(19) United States
(12) Patent Application Publication
(10) Pub. No.: US 2004/0229233 A1
(43) Pub. Date: Nov. 18, 2004

(54) Human housekeeping genes and human-tissue specific genes

(75) Inventors: Hiroyuki Aburatani, Tokyo (JP); Shogo Yamamoto, Tokyo (JP)

Correspondence Address: OLIFF & BERRIDGE, PLC, P.O. BOX 19928, ALEXANDRIA, VA, 22320, US

(73) Assignee: NGK INSULATORS, LTD., Nagoya-shi (JP)

(21) Appl. No.: 10/684,422

(22) Filed: Oct. 15, 2003

Related U.S. Application Data
(60) Provisional application No. 60/418,614, filed on Oct. 16, 2002.

(51) Int. Cl. C12Q 1/68; C07H 21/04; C12N 9/00

(52) U.S. Cl. 435/6; 435/69.1; 435/320.1; 435/325; 435/183; 536/23.2

(57) ABSTRACT

A human housekeeping gene which is a gene expressed commonly over 35 different human tissues selected from the group consisting of genes Nos.1 to 1189 on FIGS. 1 to 39, and a set of housekeeping genes consisting of two or more of the genes selected from said group.

### TECHNICAL FIELD

[0001] The present invention relates to a gene, which is expressed commonly over multiple different human tissues (housekeeping gene) and a tissue-specific gene, which is expressed specifically in each of the multiple different human tissues (tissue-specific gene).

### BACKGROUND ART

[0002] In a medical biological research field or an industrial field utilizing the result thereof, the significance of a DNA microarray is becoming greater (for a DNA microarray, see for example U.S. Pat. No. 5,474,796, Schena, M. et al., Proc. Natl. Acad. Sci. 93:10614-10619, 1996; PCT WO95/251116; PCT WO95/35505; Heller, R. A. et al., Proc. Natl. Acad. Sci. 94:2150-2155, 1997; U.S. Pat. No. 5,605,662 and the like).

[0003] For example, a DNA microarray capable of detecting an overall expression profile is utilized for identifying a pathogenic gene for the purpose of diagnosing or treating various diseases.

[0004] A research of a cancer subtype expression fingerprint employing a DNA microarray and the response thereof to a therapeutic option (see for example Golub et al., Science 286:531-537, 1999; Van'T Veer et al., Nature 415:530-536, 2002; Stauston et al., Proc. Natl. Acad. Sci. USA 98:10787-10792, 2001; Shipp et al., Nature Medicine 8:68-74, 2002; Yeoh et al., Cancer Cell 1:133-143, 2002) is also conducted extensively. For instance, the document of PCT WO99/50456 discloses a set of oligonucleotide probes, in which the respective probes hybridize with multiple genes regulated by p53 gene, and provides a cancer diagnosis using a DNA microarray fitted with this probe set.

[0005] Any of these prior art findings mainly focuses on a disease sample in a certain tissue. However, an understanding how agene is expressed in a normal tissue is very important to study the basic molecular biology similarly to the findings of pathogenic genes (see for example Warrington et al., Physiol Genomics 2:143-147, 2000; Butte et al., Physiol Genomics 7:95-96, 2001; Vaculescu et al., Nat Genet 23:387-388, 1999). In addition, such a normal human tissue expression database is very useful also as reference data in using a disease-associated gene in a diagnosis or therapy.

[0006] With this regard, Hsiao et al. reported 451 genes, which are expressed commonly in 19 normal human tissues as housekeeping genes (Hsiao et al., Physiol Genomics 7:97-104, 2001).

[0007] However, the human tissues are not limited to these 19 types, and it is also known that the gene expression profile varies depending also on the development stage. Accordingly, a further large number of the tissues should be researched for the purpose of identifying human housekeeping genes more accurately.

### DISCLOSURE OF INVENTION

[0008] The inventors analyzed as a large number of human tissues as possible for the expression genes, and finally became successful in identifying 1189 housekeeping gene populations expressed commonly over 35 different human tissues, and further listed these genes up sequentially in an order from high similarity of expression frequency in each tissue.

[0009] Further more, in each of the 35 human tissues, the inventorse also identified a population of tissue-specific genes, which are not expressed in other tissues.

[0010] The invention is based on a novel gene population as described above. That is to say, the invention provides a human housekeeping gene expressed commonly over 35 different human tissues, which gene is selected from the group consisting of genes Nos.1 to 1189 on FIGS. 1 to 39. One of the preferred embodiments of the housekeeping genes is a gene selected from genes Nos.1 to 200 on FIGS. 1 to 7, and the base sequences of the cDNAs that are transcription products of each gene, are any of SEQ ID Nos.1 to 200.

[0011] The invention also provides a transcription product of a housekeeping gene described above. It is preferred that the transcription product is an RNA or cDNA, and that a concrete example of the cDNA is a DNA fragment having any of the base sequences of SEQ ID Nos.1 to 200.

[0012] The invention also provides an oligonucleotide probe which hybridizes with the above-mentioned housekeeping gene or the above-mentioned transcription product (RNA or cDNA). In this case, the cDNA preferably has the base sequence of any of SEQ ID Nos.1 to 200.

[0013] The invention also provides a set of at least two housekeeping genes expressed commonly over 35 different human tissues, wherein each gene the set is selected from the group consisting of genes Nos.1 to 1189 on FIGS. 1 to 39. In this set of gene, each gene is preferably selected predominantly from the gene No. 1 on FIGS. 1 to 39. An example of the preferred embodiments of this gene set is a set of genes selected from genes Nos.1 to 200 on FIGS. 1 to 7, and the base sequences of the cDNAs which are the transcription products of each gene is SEQ ID Nos.1 to 200.

[0014] The invention also provides a set of transcription products of each gene of the set of genes described above. This set of transcription products are preferably a set of RNAs or cDNAs, and a typical example of the cDNAs is DNA fragments having the base sequence of any of SEQ ID Nos.1 to 200.

[0015] The invention also provides a set of oligonucleotide probes, each of which hybridizes with each gene of the set of genes described above, or with each RNA or cDNA of the set of transcription products described above. In this case, the cDNA is preferably one having the base sequence of any of SEQ ID Nos.1 to 200.

[0016] The invention also provides a DNA microarray carrying the set of transcription products or the set of probes described above.

[0017] The invention also provides the following tissue-specific genes and/or sets of genes each consisting of two or more of them.

[0018] A human whole brain-specific gene selected from the group consisting of genes Nos.1 to 294 on FIGS. 41 to 48, or a set of genes consisting of two or more of human whole brain-specific genes selected from said group.

[0019] A human amygdaloid body-specific gene, which is the gene No.295 on FIG. 48.

[0020] A human caudate nucleus-specific gene selected from the group consisting of genes Nos.296 to 303 on FIG. 48, or a set of genes consisting of two or more of human caudate nucleus-specific genes selected from said group.

[0021] A human callosum-specific gene selected from the group consisting of genes Nos.304 to 305 shown on FIGS. 48 to 49, or a set of genes consisting of two or more of human callosum-specific genes selected from said group.

[0022] A human hippocampus-specific gene, which is the gene No.306 on FIG. 49.

[0023] A human cerebellum-specific gene selected from the group consisting of genes Nos.307 to 353 on FIGS. 49 to 50, or a set of genes consisting of two or more of human cerebellum-specific genes selected from said group.

[0024] A human thalamus-specific gene selected from the group consisting of genes Nos.354 to 358 on FIG. 50, or a set of genes consisting of two or more of human thalamus-specific genes selected from said group.

[0025] A human pituitary gland-specific gene selected from the group consisting of genes Nos.359 to 383 on FIGS. 50 to 51, or a set of genes consisting of two or more of human pituitary gland-specific genes selected from said group.

[0026] A human spinal cord-specific gene selected from the group consisting of genes Nos.384 to 387 on FIG. 51, or a set of genes consisting of two or more of human spinal cord-specific genes selected from said group.

[0027] A human salivary gland-specific gene selected from the group consisting of genes Nos.388 to 401 on FIG. 51, or a set of genes consisting of two or more of human salivary gland-specific genes selected from said group.

[0028] A human thymus-specific gene selected from the group consisting of genes Nos.402 to 437 on FIGS. 51 to 52, or a set of genes consisting of two or more of human thymus-specific genes selected from said group.

[0029] A human thyroid gland-specific gene selected from the group consisting of genes Nos.438 to 457 on FIGS. 52 to 53, or a set of genes consisting of two or more of human thyroid gland-specific genes selected from said group.

[0030] A human trachea-specific gene selected from the group consisting of genes Nos.458 to 467 on FIG. 53, or a set of genes consisting of two or more of human trachea-specific genes selected from said group.

[0031] A human lung-specific gene selected from the group consisting of genes Nos.468 to 491 on FIG. 53, or a set of genes consisting of two or more of human lung-specific genes selected from said group.

[0032] A human chest-specific gene selected from the group consisting of genes Nos.492 to 505 on FIGS. 53 to 54, or asset of genes consisting of two or more of human chest-specific genes selected from said group.

[0033] A human skin-specific gene selected from the group consisting of genes Nos.506 to 577 on FIGS. 54 to 56, or a set of genes consisting of two or more of human skin-specific genes selected from said group.

[0034] A human skeletal muscle-specific gene selected from the group consisting of genes Nos.578 to 650 on FIGS. 56 to 58, or asset of genes consisting of two or more of human skeletal muscle-specific genes selected from said group.

[0035] A human heart-specific gene selected from the group consisting of genes Nos.651 to 679 on FIG. 58, or a set of genes consisting of two or more of human heart-specific genes selected from said group.

[0036] A human liver-specific gene selected from the group consisting of genes Nos.680 to 852 on FIGS. 58 to 63, or a set of genes consisting of two or more of human liver-specific genes selected from said group.

[0037] A human spleen-specific gene selected from the group consisting of genes Nos.853 to 875 on FIGS. 63 to 64, or a set of genes consisting of two or more of human spleen-specific genes selected from said group.

[0038] A human kidney-specific gene selected from the group consisting of genes Nos.876 to 907 on FIG. 64, or a set of genes consisting of two or more of human kidney-specific genes selected from said group.

[0039] A human adrenal gland-specific gene selected from the group consisting of genes Nos.908 to 935 on FIGS. 64 to 65, or a set of genes consisting of two or more of human adrenal gland-specific genes selected from said group.

[0040] A human pancreas-specific gene selected from the group consisting of genes Nos.936 to 964 on FIGS. 65 to 66, or a set of genes consisting of two or more of human pancreas-specific genes selected from said group.

[0041] A human stomach-specific gene selected from the group consisting of genes Nos.965 to 985 on FIG. 66, or a set of genes consisting of two or more of human stomach-specific genes selected from said group.

[0042] A human small intestine-specific gene selected from the group consisting of genes Nos.986 to 1021 on FIGS. 66 to 67, or a set of genes consisting of two or more of human small intestine-specific genes selected from said group.

[0043] A human large intestine-specific gene selected from the group consisting of genes Nos.1022 to 1034 on FIGS. 67 to 68, or a set of genes consisting of two or more of human large intestine-specific genes selected from said group.

[0044] A human urinary bladder-specific gene selected from the group consisting of genes Nos.1035 to 1044 on FIG. 68, or a set of genes consisting of two or more of human urinary bladder-specific genes selected from said group.

[0045] A human prostate-specific gene selected from the group consisting of genes Nos.1045 to 1052 on FIG. 68, or a set of genes consisting of two or more of human prostate-specific genes selected from said group.

[0046] A human testis-specific gene selected from the group consisting of genes Nos.1053 to 1459 on FIGS. 68 to 79, or a set of genes consisting of two or more of human testis-specific genes selected from said group.

[0047] A human ovary-specific gene selected from the group consisting of genes Nos.1460 to 1466 on FIG. 79, or a set of genes consisting of two or more of human ovary-specific genes selected from said group.

[0048] A human placenta-specific gene selected from the group consisting of genes Nos.1467 to 1561 on FIGS. 79 to 82, or a set of genes consisting of two or more of human placenta-specific genes selected from said group.

[0049] A human uterus-specific gene selected from the group consisting of genes Nos.1562 to 1572 on FIG. 82, or a set of genes consisting of two or more of human uterus-specific genes selected from said group.

[0050] A human bone marrow-specific gene selected from the group consisting of genes Nos.1573 to 1647 on FIGS. 82 to 84, or a set of genes consisting of two or more of human bone marrow-specific genes selected from said group.

[0051] A human fetal brain-specific gene selected from the group consisting of genes Nos.1648 to 1678 on FIGS. 84 to 85, or a set of genes consisting of two or more of human fetal brain-specific genes selected from said group.

[0052] A human fetal liver-specific gene selected from the group consisting of genes Nos.1679 to 1704 on FIG. 85, or a set of genes consisting of two or more of human fetal liver-specific genes selected from said group.

[0053] The invention also provides a transcription product of any of the above-mentioned tissue-specific genes and a set of transcription products thereof, as well as an oligonucleotide probe and a set thereof.

[0054] The invention also provides a DNA microarray carrying the set of tissue-specific genes' transcription products or the set of probe.

[0055] Thus, the inventors employed a GeneChip U133 microarray produced by Affymetrix to search 20708 genes in 35 normal tissues (FIG. 40) and finally identified 1189 genes (housekeeping genes) shown in FIGS. 1 to 39. At the same time, the inventors identified (a group of) genes which are expressed specifically in respective 35 normal tissues (FIGS. 41 to 85).

[0056] In FIGS. 1 to 31, the left column represents gene numbers, Column A represents GeneChip U133 probe sets, Column B represents gene names, Column C represents UniGene IDs, Column D represents GeneBank (URL:http://www.ncbi.nlm.nih.gov/) register numbers, Column E represents gene abbreviations, Column F represents gene-locating chromosome numbers, Column G represents statistically obtained mean values, and Column H represents coefficients of variance (CV). A smaller “CV value” corresponds to a higher similarity in the gene expression degree in each tissue, and in FIGS. 1 to 39 a gene is listed up in an order from smaller CV value (i.e. higher similarity of gene expression)

[0057] In FIGS. 41 to 85, the left column represents gene numbers, Column A represents tissues, Column B represents GeneChip U133 probe sets, Column C represents gene names, Column D represents UniGene IDs, Column E represents GeneBank register numbers, Column F represents gene abbreviations, Column G represents gene-locating chromosome numbers, Column H represents tissue-specific scores, Column I represents expression frequency values in respective tissues, Column J represents logarithmic expression values in respective tissues, Column K represents mean values in other tissues, and Column L represents standard deviations.

[0058] These data have been published since Apr. 16, 2002 (updated on Jul. 17, 2002) in SBM database published by the inventors via Internet (URL:http://www2.genome.rcast.u-tokyo.ac jp/database/).

[0059] This invention is based on the gene populations as described above. As used herein, the term “gene” means a DNA sequence encoding the entire transcription product (including such as intron, expression regulatory sequence and the like), preferably an isolated and purified DNA sequence.

[0060] The term “transcription product” means an RNA molecule transcribed from a gene, as well as a protein or peptide translated from this RNA molecule. A cDNA synthesized artificially from RNA (mRNA) is also included in this transcription product.

[0061] The term “normal human tissue” means a human body tissue of a human (including a fetus) having no certain detected disease and the like.

[0062] The term “gene expression” is defined as that a gene transcription product (RNA) is present in a significantly larger amount (P<0.05, detection value P determined by statistical analysis mentioned below). Accordingly, any of the “housekeeping gene” is a gene whose detection value P is less than 0.05 over the entire 35 tissues. The term “tissue-specific gene” represents a gene whose detection value P in the single specific tissue is less than 0.05 and that in any of other 34 tissues is 0.05 or more.

[0063] The term “oligonucleotide probe” means a nucleotide sequence which hybridizes with an intended DNA fragment or RNA fragment on the basis of the sequence complementarily, and which has 6 to 100 nucleotide length. Nevertheless, it may have an appropriate length within the ranges, for example, from 100 to 200 nucleotides, 200 to 500 nucleotides.

[0064] Other terms and concepts employed in the invention are described in the following embodiments. Various gene engineering technologies and the like employed for conducting the invention can readily and surely be performed by those skilled in the art based for example on a known reference (for example, in Sambrook and Maniatis, Molecular Cloning, A Laboratory Manual, Cold Spring Harbor Laboratory Press, New York, 1989; Ausubel, F. M. et al., Current Protocols in Molecular Biology, John Wiley & Sons, New York, N.Y., 1995) except for those otherwise specified for their sources.

### BRIEF DESCRIPTION OF DRAWINGS

[0065] FIGS. 1 to 39 show the lists of the housekeeping genes provided by the invention.

[0066] FIG. 40 shows the list of the normal human tissues subjected in the invention.

[0067] FIGS. 41 to 85 show the lists of the tissue-specific genes provided by the invention.

### BEST MODE FOR CARRYING OUT THE INVENTION

[0068] The sequences (genome sequences, mRNA sequences and the like) of the housekeeping genes of the invention are well-known, registered under the GeneBank database register numbers shown in Column D in FIGS. 1 to 39, and the genes of No. 1 to 200 shown in FIGS. 1 to 7 have the respective cDNA sequences represented by SEQ ID Nos.1 to 200. Accordingly, any of these housekeeping genes can be isolated by screening a human genome DNA library using a probe synthesized based on the sequences disclosed in the databases or the sequences represented by SEQ ID Nos.1 to 200. Also by method of PCR using a human genome library as a template, individual genes (DNA fragments) can be obtained. Even in the case of an unknown register number, the RNA of an intended gene can be identified by using a microarray GeneChip U133 probe set shown in Column A, and a library screening using this RNA or cDNA as a probe may for example be employed for obtaining the intended gene.

[0069] The resultant gene can be amplified by an ordinary gene amplification method such as PCR, NASBN (nucleic acid sequence-based amplification), TMA (transcription-mediated amplification) and SDA (strand displacement amplification) to obtain purified DNA fragment.

[0070] According to an inventive housekeeping gene, its transcription product can be used as a reference in comparing respective data for example when measuring an expressed gene in a specific tissue under two or more different conditions. The transcription product of the housekeeping gene can be used also as a control in investigating the expression localization of any gene.

[0071] While a single housekeeping gene can be used, a set of two or more can also be used. As used herein, the term “set” means multiple genes arbitrarily selected from genes Nos.2 to 1189, and a population for example of 5, 10, 25, 50, 100, 150, 200, 500 or 1000 genes can be used. In this context, it is preferable to select the genes predominantly from the smaller number-designated genes of FIGS. 1 to 39. Thus, 1189 genes in FIGS. 1 to 39 are listed in an order from smaller CV values (smaller difference in expression frequency between respective tissues). Accordingly, the gene list in FIGS. 1 to 30 provides a number of genes having a higher expression similarity in multiple tissue comparison to β-actin (No.176) and glycerardehyde-3-phosphate dehydrogenase (No.182) that are employed frequently as controls in investigating the expression localization of any gene.

[0072] Also in the case of the tissue-specific genes of the invention, individual gene DNA fragments can be obtained based on the probe sets shown in Column B in FIGS. 41 to 85 and the GeneBank register numbers shown in Column E, and then amplified and purified.

[0073] These tissue-specific genes or a set thereof can be used in an examination for the differentiation from an undifferentiated cell (ES cell or stem cell) to a specific cell using the presence of a transcription product or the degree of gene expression as an index.

[0074] An inventive transcription product is an RNA molecule of each of the above-mentioned housekeeping genes and tissue-specific genes, a protein or peptide translated and expressed from this RNA molecule, or a cDNA fragment synthesized artificially from the RNA molecule. The RNA molecule or cDNA can be obtained based for example on a known method (for example see Mol. Cell Biol. 2, 161-170, 1982; J. Gene 25, 263-269, 1983: Gene, 150, 243-250, 1994). The protein or peptide can be obtained by a gene engineering method using the before-mentioned gene or cDNA fragment (for example, a method employing an in vitro transcription system or host-vector system). For example in a method employing a host/vector system, a transformant cell is cultured to obtain a cell culture, which is then subjected to an isolation and purification by means of a treatment with a denaturing agent such as urea, or with a surfactant, ultrasonic treatment, enzyme digestion, salting-out or solvent precipitation, dialysis, centrifugation, ultrafiltration, gel-filtration, SDS-PAGE, isoelectric electrophoresis, ion exchange chromatography, hydrophobic chromatography, affinity chromatography, reverse-phase chromatography and the like to obtain an intended protein and the like. A protein fused with glutathion-S-transferase (GST) or green fluorescent protein (GFP) or a protein having a His tag or FLAG tag added thereto may also be included in the inventive protein and the like.

[0075] Any of these transcription products can be used for a target or means for determining the expression level of the housekeeping gene or the tissue-specific gene described above. For example, RNA can be examined for its expression by means of a northern blotting, slot blotting, dot blotting, DNA microarray and the like. A protein can be measured by method of sandwich assay, ELISA, immunoprecipitation, western blotting and the like, in which a specific antibody for the protein and the like is employed. A cDNA fragment can be employed as a capture probe for DNA microarray.

[0076] An inventive oligonucleotide probe is a nucleotide (RNA or DNA) sequence which hybridizes with the above-mentioned housekeeping gene DNA or tissue-specific gene DNA, or transcription product thereof which is an RNA molecule or cDNA fragment. The probe may be deposited on a soluble or insoluble polymer, or may be deposited on or bound to a solid support such as a filter, sheet, chip, slide, bead and the like. Alternatively, it may be labeled with an enzyme, fluorescent dye, radioisotope and the like. Any of such probes can be used in a known hybridization assay using a DNA microarray and the like. The assay can be conducted as desired for its purpose under various stringent conditions in the steps of hybridization and washing (modification of salt concentration, organic solvent (formamide and the like) concentration, temperature) (for example, see U.S. Pat. No. 6,100,037 and the like).

[0077] An inventive DNA microarray is fitted with a set of the above-mentioned respective transcription products (cDNA fragments) or oligonucleotide probes as a capture probe. The capture probe may be in a mode in which its base is synthesized on a base-by-base basis on a support (Affymetrix type), or in a mode in which a probe DNA fragment is spotted on a support (Stamford type) (for example, see U.S. Pat. No. 5,474,796, Schena, M. et al., Proc. Natl. Acad. Sci. 93:10614-10619, 1996; PCT WO95/251116; PCT WO95/35505; Heller, R. A. et al., Proc. Natl. Acad. Sci. 94:2150-2155, 1997; U.S. Pat. No. 5,605,662 and the like).

[0078] The identification of the inventive housekeeping genes and tissue-specific genes are further detailed below.

[0079] 1. Samples

[0080] The RNA samples derived from 35 tissues shown in FIG. 40 were employed. A total RNA and a polyA RNA were purchased from Clontech (Palo Alto, Calif.), Ambion (Austin, Tex.) and Stratagene (La Jolla, Calif.). Each liver, stomach or lung was obtained from a surgical resection sample after obtaining an informed consent, and was subjected to conventional method to obtain RNA.

[0081] 2. DNA Microarray Protocol

[0082] The microarray experiment procedure was in accordance with the GeneChip expression analysis technical manual by Affymetrix. Briefly, each 10 mg of the RNA was subjected to synthesize a biotinylated cDNA. This cDNA was hybridized with an oligonucleotide array (GeneChip Human U133 array: Affymetrix, Santa Crara, Calif.). After washing, the array was stained with a streptoavidin-phycoerythrin and its image data were accumulated using a Hewlett-Packard Scanner and then analyzed. The “average difference” of each gene probe on the array was calculated by an analysis program “GeneChip Analysis Suite software version 5.0”. The average difference was normalized so that the median of each array became 100. In addition to the average difference value, the detection value P of each gene was calculated in accordance with the density difference between the match-probe and the mismatch-probe of several ten combinations or more.

[0083] 3. Statistic Analysis

[0084] As a standard for the gene expression, the detection value P less than 0.05 was employed, and a gene whose detection value P was less than 0.05 for all of the 35 tissues was regarded as a housekeeping gene. Similarly, a gene whose expression detection value P in a single tissue was less than 0.05 and whose expression detection values P in other 34 tissues were 0.05 or more was regarded as a tissue-specific gene.

[0085] A housekeeping gene was subjected to a calculation for a coefficient of variation (CV) as reported before (Hsiao L. L. et al., Physiol. Genomics 7:97-104, 2001).

[0086] In the identification of a tissue-specific gene, a clustering analysis was conducted for the purpose of obtaining an overall similarity among different tissues. A stratified clustering was conducted by an operation of the “Cluster” program and the “Treeview” program (Eisen. M. B. et al., Proc. Natl. Acad. Sci. USA 95:14863-14868, 1998). The distance metrics is of a piasson correlation. Prior to the clustering, genes whose standard deviation between samples was 50 or less or whose difference between the maximum expression and the minimum expression in each tissue was 200 or less was excluded. Thereafter, the data were converted logarithmically and standardized by means of making the mean value and deviation of a gene expression identical to each other. Finally, an average linkage clustering was obtained using the cluster programs.

### INDUSTRIAL APPLICABILITY

[0087] As detailed above, the present invention provides a novel population of housekeeping genes expressed commonly over 35 different human normal tissues, and a novel population of tissue-specific genes expressed specifically in a single tissue. A gene or a gene set selected from these gene populations is useful as a reference and the like for a normal gene expression or disease-associated gene expression measured under various conditions. A transcription product from the gene or a probe for the gene is also useful as a DNA microarray capture probe.

1. A human housekeeping expressed commonly over 35 different human tissues, which gene is selected from the group consisting of genes Nos.1 to 1189 on FIGS. 1 to 39.

2. The gene of claim 1, which is selected from genes Nos.1 to 200 on FIGS. 1 to 7.

3. A transcription product of the gene of claim 1.

4. The transcription product of claim 3, which is an RNA or cDNA.

5. The transcription product of claim 4, wherein the cDNA has the base sequence of any of SEQ ID NOs: 1, 3, 5, 6, 8, 10-12, 14, 16-19, 21, 23, 25, 27, 28, 30-35, 37-39, 41-43, 45, 47, 49, 51, 53, 54, 56, 57, 59, 60, 62, 64, 66, 67, 69, 71, 72, 74, 75, 77, 79, 80, 82, 84, 86, 87, 89, 91, 93, 95, 97, 98, 100, 102, 103, 105, 107, 109, 111, 113, 115, 117, 118, 120, 122, 123, 125, 127, 128, 130-132, 134, 136, 137, 139, 141-143, 145, 146, 148, 150, 152, 154, 156, 157, 159, 161, 163, 164, 166, 168-170, 172, 174, 176, 178, 180, 181, 183, 185, 186, 188, 189, 191, 193, 195, 196, 198, 199, 201, 202, 204, 206-208, 210, 212, 214, 216, 218, 219, 221, 222, 224, 225, 227, 229, 231, 233, 234, 236, 237, 239, 241, 243, 245, 247, 248, 250, 252, 254, 256, 258, 260, 262, 263, 265, 267, 269, 270, 272, 274, 276-278, 280, 281, 283, 285-289, 291, 293, 295, 297, 299, 300, 302, 304, 306, 307, 309, 311-313, 315, 317, 319, 320, 322, 324, 326, 328, 330 and 331.

6. An oligonucleotide probe, which hybridizes with the gene of claim 1.

7. The probe of claim 6, wherein the transcription product is a cDNA having the base sequence of any of SEQ ID NOs: 1, 3, 5, 6, 8, 10-12, 14, 16-19, 21, 23, 25, 27, 28, 30-35, 37-39, 41-43, 45, 47, 49, 51, 53, 54, 56, 57, 59, 60, 62, 64, 66, 67, 69, 71, 72, 74, 75, 77, 79, 80, 82, 84, 86, 87, 89, 91, 93, 95, 97, 98, 100, 102, 103, 105, 107, 109, 111, 113, 115, 117, 118, 120, 122, 123, 125, 127, 128, 130-132, 134, 136, 137, 139, 141-143, 145, 146, 148, 150, 152, 154, 156, 157, 159, 161, 163, 164, 166, 168-170, 172, 174, 176, 178, 180, 181, 183, 185, 186, 188, 189, 191, 193, 195, 196, 198, 199, 201, 202, 204, 206-208, 210, 212, 214, 216, 218, 219, 221, 222, 224, 225, 227, 229, 231, 233, 234, 236, 237, 239, 241, 243, 245, 247, 248, 250, 252, 254, 256, 258, 260, 262, 263, 265, 267, 269, 270, 272, 274, 276-278, 280, 281, 283, 285-289, 291, 293, 295, 297, 299, 300, 302, 304, 306, 307, 309, 311-313, 315, 317, 319, 320, 322, 324, 326, 328, 330 and 331.

8. A set of at least two housekeeping genes expressed commonly over 35 different human tissues, wherein each gene of the set is selected from the group consisting of genes Nos.1 to 1189 on FIGS. 1 to 39.

9. The set of genes of claim 8, wherein each gene is selected predominantly from the gene No.1 on FIGS. 1 to 39.

10. The set of genes of claim 8, wherein each gene is selected from genes Nos.1 to 200 on FIGS. 1 to 7.

11. A set of transcription products from each gene of the set of the genes of claim 8.

12. The set of transcription products of claim 11, wherein the product is an RNA or cDNA.

13. The set of transcription products of claim 12, wherein the cDNA has the base sequence of any of SEQ ID NOs:1, 3, 5, 6, 8, 10-12, 14, 16-19, 21, 23, 25, 27, 28, 30-35, 37-39, 41-43, 45, 47, 49, 51, 53, 54, 56, 57, 59, 60, 62, 64, 66, 67, 69, 71, 72, 74, 75, 77, 79, 80, 82, 84, 86, 87, 89, 91, 93, 95, 97, 98, 100, 102, 103, 105, 107, 109, 111, 113, 115, 117, 118, 120, 122, 123, 125, 127, 128, 130-132, 134, 136, 137, 139, 141-143, 145, 146, 148, 150, 152, 154, 156, 157, 159, 161, 163, 164, 166, 168-170, 172, 174, 176, 178, 180, 181, 183, 185, 186, 188, 189, 191, 193, 195, 196, 198, 199, 201, 202, 204, 206-208, 210, 212, 214, 216, 218, 219, 221, 222, 224, 225, 227, 229, 231, 233, 234, 236, 237, 239, 241, 243, 245, 247, 248, 250, 252, 254, 256, 258, 260, 262, 263, 265, 267, 269, 270, 272, 274, 276-278, 280, 281, 283, 285-289, 291, 293, 295, 297, 299, 300, 302, 304, 306, 307, 309, 311-313, 315, 317, 319, 320, 322, 324, 326, 328, 330 and 331.

14. A set of oligonucleotide probes, each of which hybridizes with each gene of the set of genes of claim 8.

15. The set probes of claim 14, wherein the transcription product is a cDNA having the base sequence of any of SEQ ID NOs:1, 3, 5, 6, 8, 10-12, 14, 16-19, 21, 23, 25, 27, 28, 30-35, 37-39, 41-43, 45, 47, 49, 51, 53, 54, 56, 57, 59, 60, 62, 64, 66, 67, 69, 71, 72, 74, 75, 77, 79, 80, 82, 84, 86, 87, 89, 91, 93, 95, 97, 98, 100, 102, 103, 105, 107, 109, 111, 113, 115, 117, 118, 120, 122, 123, 125, 127, 128, 130-132, 134, 136, 137, 139, 141-143, 145, 146, 148, 150, 152, 154, 156, 157, 159, 161, 163, 164, 166, 168-170, 172, 174, 176, 178, 180, 181, 183, 185, 186, 188, 189, 191, 193, 195, 196, 198, 199, 201, 202, 204, 206-208, 210, 212, 214, 216, 218, 219, 221, 222, 224, 225, 227, 229, 231, 233, 234, 236, 237, 239, 241, 243, 245, 247, 248, 250, 252, 254, 256, 258, 260, 262, 263, 265, 267, 269, 270, 272, 274, 276-278, 280, 281, 283, 285-289, 291, 293, 295, 297, 299, 300, 302, 304, 306, 307, 309, 311-313, 315, 317, 319, 320, 322, 324, 326, 328, 330 and 331.

16. A DNA microarray carrying the set of transcription products of claim 12.

17. A human whole brain-specific gene selected from the group consisting of genes Nos.1 to 294 on FIGS. 41 to 48, or a set of genes consisting of two or more of human whole brain-specific genes selected from said group.

18. A human amygdaloid body-specific gene, which is the gene No.295 on FIG. 48.

19. A human caudate nucleus-specific gene selected from the group consisting of genes Nos.296 to 303 on FIG. 48, or a set of genes consisting of two or more of human caudate nucleus-specific genes selected from said group.

20. A human callosum-specific gene selected from the group consisting of genes Nos.304 to 305 shown on FIGS. 48 to 49, or a set of genes consisting of two or more of human callosum-specific genes selected from said group.

21. A human hippocampus-specific gene, which is the gene No.306 on FIG. 49.

22. A human cerebellum-specific gene selected from the group consisting of genes Nos.307 to 353 on FIGS. 49 to 50, or a set of genes consisting of two or more of human cerebellum-specific genes selected from said group.

23. A human thalamus-specific gene selected from the group consisting of genes Nos.354 to 358 on FIG. 50, or a set of genes consisting of two or more of human thalamus-specific genes selected from said group.

24. A human pituitary gland-specific gene selected from the group consisting of genes Nos.359 to 383 on FIGS. 50 to 51, or a set of genes consisting of two or more of human pituitary gland-specific genes selected from said group.

25. A human spinal cord-specific gene selected from the group consisting of genes Nos.384 to 387 on FIG. 51, or a set of genes consisting of two or more of human spinal cord-specific genes selected from said group.

26. A human salivary gland-specific gene selected from the group consisting of genes Nos.388 to 401 on FIG. 51, or a set of genes consisting of two or more of human salivary gland-specific genes selected from said group.

27. A human thymus-specific gene selected from the group consisting of genes Nos.402 to 437 on FIGS. 51 to 52, or a set of genes consisting of two or more of human thymus-specific genes selected from said group.

28. A human thyroid gland-specific gene selected from the group consisting of genes Nos.438 to 457 on FIGS. 52 to 53, or a set of genes consisting of two or more of human thyroid gland-specific genes selected from said group.

29. A human trachea-specific gene selected from the group consisting of genes Nos.458 to 467 on FIG. 53, or a set of genes consisting of two or more of human trachea-specific genes selected from said group.

30. A human lung-specific gene selected from the group consisting of genes Nos.468 to 491 on FIG. 53, or a set of genes consisting of two or more of human lung-specific genes selected from said group.

31. A human chest-specific gene selected from the group consisting of genes Nos.492 to 505 on FIGS. 53 to 54, or asset of genes consisting of two or more of human chest-specific genes selected from said group.

32. A human skin-specific gene selected from the group consisting of genes Nos.506 to 577 on FIGS. 54 to 56, or a set of genes consisting of two or more of human skin-specific genes selected from said group.

33. A human skeletal muscle-specific gene selected from the group consisting of genes Nos.578 to 650 on FIGS. 56 to 58, or asset of genes consisting of two or more of human skeletal muscle-specific genes selected from said group.

34. A human heart-specific gene selected from the group consisting of genes Nos.651 to 679 on FIG. 58, or a set of genes consisting of two or more of human heart-specific genes selected from said group.

35. A human liver-specific gene selected from the group consisting of genes Nos.680 to 852 on FIGS. 58 to 63, or a set of genes consisting of two or more of human liver-specific genes selected from said group.

36. A human spleen-specific gene selected from the group consisting of genes Nos.853 to 875 on FIGS. 63 to 64, or a set of genes consisting of two or more of human spleen-specific genes selected from said group.

37. A human kidney-specific gene selected from the group consisting of genes Nos.876 to 907 on FIG. 64, or a set of genes consisting of two or more of human kidney-specific genes selected from said group.

38. A human adrenal gland-specific gene selected from the group consisting of genes Nos.908 to 935 on FIGS. 64 to 65, or a set of genes consisting of two or more of human adrenal gland-specific genes selected from said group.

39. A human pancreas-specific gene selected from the group consisting of genes Nos.936 to 964 on FIGS. 65 to 66, or a set of genes consisting of two or more of human pancreas-specific genes selected from said group.

40. A human stomach-specific gene selected from the group consisting of genes Nos.965 to 985 on FIG. 66, or a set of genes consisting of two or more of human stomach-specific genes selected from said group.

41. A human small intestine-specific gene selected from the group consisting of genes Nos.986 to 1021 on FIGS. 66 to 67, or a set of genes consisting of two or more of human small intestine-specific genes selected from said group.

42. A human large intestine-specific gene selected from the group consisting of genes Nos.1022 to 1034 on FIGS. 67 to 68, or a set of genes consisting of two or more of human large intestine-specific genes selected from said group.

43. A human urinary bladder-specific gene selected from the group consisting of genes Nos.1035 to 1044 on FIG. 68, or a set of genes consisting of two or more of human urinary bladder-specific genes selected from said group.

44. A human prostate-specific gene selected from the group consisting of genes Nos.1045 to 1052 on FIG. 68, or a set of genes consisting of two or more of human prostate-specific genes selected from said group.

45. A human testis-specific gene selected from the group consisting of genes Nos.1053 to 1459 on FIGS. 68 to 79, or a set of genes consisting of two or more of human testis-specific genes selected from said group.

46. A human ovary-specific gene selected from the group consisting of genes Nos.1460 to 1466 on FIG. 79, or a set of genes consisting of two or more of human ovary-specific genes selected from said group.

47. A human placenta-specific gene selected from the group consisting of genes Nos.1467 to 1561 on FIGS. 79 to 82, or a set of genes consisting of two or more of human placenta-specific genes selected from said group.

48. A human uterus-specific gene selected from the group consisting of genes Nos.1562 to 1572 on FIG. 82, or a set of genes consisting of two or more of human uterus-specific genes selected from said group.

49. A human bone marrow-specific gene selected from the group consisting of genes Nos.1573 to 1647 on FIGS. 82 to 84, or a set of genes consisting of two or more of human bone marrow-specific genes selected from said group.

50. A human fetal brain-specific gene selected from the group consisting of genes Nos.1648 to 1678 on FIGS. 84 to 85, or a set of genes consisting of two or more of human fetal brain-specific genes selected from said group.

51. A human fetal liver-specific gene selected from the group consisting of genes Nos.1679 to 1704 on FIG. 85, or a set of genes consisting of two or more of human fetal liver-specific genes selected from said group.

52. A transcription product of any of the genes of claim 17.

53. The transcription product of claim 52, which is an RNA or cDNA.

54. An oligonucleotide probe, which hybridizes with any of the gene of claim 17.

55. A set of transcription products from each gene of any set of genes of claim 17.

56. The set of transcription products of claim 55, which is a set of an RNA or cDNA.

57. A set of oligonucleotide probes, wherein each probe hybridizes with each gene of any set of genes of claim 17.

58. A DNA microarray carrying the set of transcription products of claim 56.

The application's sequence listing, which the Patent Office published only in electronic form, follows.

SEQUENCE LISTING (332 sequences)

SEQ ID NO: 1 - DNA, 2192 bp, Homo sapiens
  CDS (69)..(2126)
tagttccgtcgcagccgggatttgggtcgcggttcttgtttgtggatcgctgtgatcgtcacttgacaatgcagatcttcgtgaagactctgactggtaagaccatcaccctcgaggttgagcccagtgacaccatcgagaatgtcaaggcaaagatccaagataaggaaggcatccctcctgaccagcagaggctgatctttgctggaaaacagctggaagatgggcgcaccctgtctgactacaacatccagaaagagtccaccctgcacctggtgctccgtctcagaggtgggatgcaaatcttcgtgaagacactcactggcaagaccatcacccttgaggtggagcccagtgacaccatcgagaacgtcaaagcaaagatccaggacaaggaaggcattcctcctgaccagcagaggttgatctttgccggaaagcagctggaagatgggcgcaccctgtctgactacaacatccagaaagagtctaccctgcacctggtgctccgtctcagaggtgggatgcagatcttcgtgaagaccctgactggtaagaccatcaccctcgaggtggagcccagtgacaccatcgagaatgtcaaggcaaagatccaagataaggaaggcattcctcctgatcagcagaggttgatctttgccggaaaacagctggaagatggtcgtaccctgtctgactacaacatccagaaagagtccaccttgcacctggtactccgtctcagaggtgggatgcaaatcttcgtgaagacactcactggcaagaccatcacccttgaggtcgagcccagtgacactatcgagaacgtcaaagcaaagatccaagacaaggaaggcattcctcctgaccagcagaggttgatctttgccggaaagcagctggaagatgggcgcaccctgtctgactacaacatccagaaagagtctaccctgcacctggtgctccgtctcagaggtgggatgcagatcttcgtgaagaccctgactggtaagaccatcaccctcgaagtggagccgagtgacaccattgagaatgtcaaggcaaagatccaagacaaggaaggcatccctcctgaccagcagaggttgatctttgccggaaaacagctggaagatggtcgtaccctgtctgactacaacatccagaaagagtccaccttgcacctggtgctccgtctcagaggtgggatgcagatcttcgtgaagaccctgactggtaagaccatcactctcgaggtggagccgagtgacaccattgagaatgtcaaggcaaagatccaagacaaggaaggcatccctcctgatcagcagaggttgatctttgctgggaaacagctggaagatggacgcaccctgtctgactacaacatccagaaagagtccaccctgcacctggtgctccgtcttagaggtgggatgcagatcttcgtgaagaccctgactggtaagaccatcactctcgaagtggagccgagtgacaccattgagaatgtcaaggcaaagatccaagacaaggaaggcatccctcctgaccagcagaggttgatctttgctgggaaacagctggaagatggacgcaccctgtctgactacaacatccagaaagagtccaccctgcacctggtgctccgtcttagaggtgggatgcagatcttcgtgaagaccctgactggtaagaccatcactctcgaagtggagccgagtgacaccattgagaatgtcaaggcaaagatccaagacaaggaaggcatccctcctgaccagcagaggttgatctttgctgggaaacagctggaagatggacgcaccctgtctgactacaacatccagaaagagtccaccctgcacctggtgctccgtctcagaggtgggatgcagatcttcgtgaagaccctgactggtaagaccatcaccctcgaggtggagcccagtgacaccatcgagaatgtcaaggcaaagatccaagataaggaaggcatccctcctgatcagcagaggttgatctttgctgggaaacagctggaagatggacgcaccctgtctgactacaacatccagaaagagtccactctgcacttggtcctgcgcttgagggggggtgtctaagtttccccttttaaggtttcaacaaatttcattgcactttcctttcaataaagttgttgcattccc

SEQ ID NO: 2 - protein, 685 aa, Homo sapiens
MQIFVKTLTGKTITLEVEPSDTIENVKAKIQDKEGIPPDQQRLIFAGKQLEDGRTLSDYNIQKESTLHLVLRLRGGMQIFVKTLTGKTITLEVEPSDTIENVKAKIQDKEGIPPDQQRLIFAGKQLEDGRTLSDYNIQKESTLHLVLRLRGGMQIFVKTLTGKTITLEVEPSDTIENVKAKIQDKEGIPPDQQRLIFAGKQLEDGRTLSDYNIQKESTLHLVLRLRGGMQIFVKTLTGKTITLEVEPSDTIENVKAKIQDKEGIPPDQQRLIFAGKQLEDGRTLSDYNIQKESTLHLVLRLRGGMQIFVKTLTGKTITLEVEPSDTIENVKAKIQDKEGIPPDQQRLIFAGKQLEDGRTLSDYNIQKESTLHLVLRLRGGMQIFVKTLTGKTITLEVEPSDTIENVKAKIQDKEGIPPDQQRLIFAGKQLEDGRTLSDYNIQKESTLHLVLRLRGGMQIFVKTLTGKTITLEVEPSDTIENVKAKIQDKEGIPPDQQRLIFAGKQLEDGRTLSDYNIQKESTLHLVLRLRGGMQIFVKTLTGKTITLEVEPSDTIENVKAKIQDKEGIPPDQQRLIFAGKQLEDGRTLSDYNIQKESTLHLVLRLRGGMQIFVKTLTGKTITLEVEPSDTIENVKAKIQDKEGIPPDQQRLIFAGKQLEDGRTLSDYNIQKESTLHLVLRLRGGV

SEQ ID NO: 3 - DNA, 721 bp, Homo sapiens
  CDS (20)..(430)
tcgagccagcgtcgccgcgatggtgttgttggagagcgagcagttcctgacggagctgaccagacttttccagaagtgccggacgtcgggcagcgtctatatcaccttgaagaagtatgacggtcgaaccaaacccattccaaagaaaggtactgtggagggctttgagcccgcagacaacaagtgtctgttaagagctaccgatgggaagaagaagatcagcactgtggtgagctccaaggaagtgaataagtttcagatggcttattcaaacctccttagagctaacatggatgggttgaagaagagagacaaaaagaacaaaactaagaagaccaaagcagcagcagcagcagcagcagcagcacctgccgcagcagcaacagcagcaacaacagcagcaacaacagcagcaacagcagcacagtaaagggcatacatttcctgctttcaccaattaaccactgaattgctattttttccttttggccagatagctaggtttctggttcccccacagtaggtgttttcacataagattagggtccttttggaaagaatagttgcagtgtttataggatagttgtggtaagaatctagtttattttgcatttggctaattggtctgtgctgcatggttatatactcctggattatagattaaaagtctctgtagacatctctgtgaagagcaagctatcattaaacatgtctgtttatc

SEQ ID NO: 4 - protein, 136 aa, Homo sapiens
MVLLESEQFLTELTRLFQKCRTSGSVYITLKKYDGRTKPIPKKGTVEGFEPADNKCLLRATDGKKKISTVVSSKEVNKFQMAYSNLLRANMDGLKKRDKKNKTKKTKAAAAAAAAAPAAAATAATTAATTAATAAQ

SEQ ID NO: 5 - DNA, 1197 bp, Homo sapiens
kttttagccacctacatgacatgtttttcttaaaaacaatgcctccactccaaataaatcacagtcaaaataaatgaagagctcaagatgacatcagtcccatttgtcttaagtcctggtgttgtgtggatgacaagcagaagccagttatgatgacaggtgatagatccaaaataattgccacatttgttaacatttttccatttctaaaccatccttaaagaaaatcatatatggggtcacaccatcctcccggtagtccaatagagcaaccatgccatctggattcatgttttcaccaataaagaactggtagtttttgaaattagcaaggatgtgcttgatttgttctgcagcccctgtcataaaaggttttactctttctggtctctgttcttcaagtttccctttgattgatttcatgtaattaattaattaattaattaattattaattaattaattaattaattaattaattattaattaattaattaattaattaattaattattaattaattaattaattaattaattaattattaattaattaattaattaattaattaattattaattaattaattaattaattaattaattattaattaattaattaattaattaattaattattaattaattaattaattaattaattaattattaattaattaattaattaattaattaattattaattaattaattaattaattaattaattattaattaattaattaattaattaattaattattaattaattaattaattaattaattaattattaattaattaattaattaattaattaattattaattaattaattaattaattaattaattattaattaattaattaattaattaattaattatctaatctaatctaatctaatctaatctaatctaatctatctaatctaatctaatctaatctaatctaatctaatctatctaatctaatctaatctaatctaatctaatctaatctatctaatctaatctaatctaatctaatctaatctaatctatctaatctaatctaatctaatctaatctaatctaatctatctaatctaatctaatctaatctaatctaatctaatctatctaatctaatctaatctaatctaatctaatctaatctatctaatctaatctaatctaatctaatctaatctaatctat

SEQ ID NO: 6 - DNA, 971 bp, Homo sapiens
  CDS (139)..(828)
cactcgttgcataaatttgcgctccgccagcccggagcatttaggggcggttggctttgttgggtgagcttgtttgtgtccctgtgggtggacgtggttggtgattggcaggatcctggtatccgctaacaggtcaaaatgcagatcttcgtgaaaacccttaccggcaagaccatcacccttgaggtggagcccagtgacaccatcgaaaatgtgaaggccaagatccaggataaggaaggcattccccccgaccagcagaggctcatctttgcaggcaagcagctggaagatggccgtactctttctgactacaacatccagaaggagtcgaccctgcacctggtcctgcgtctgagaggtggtatgcagatcttcgtgaagaccctgaccggcaagaccatcaccctggaagtggagcccagtgacaccatcgaaaatgtgaaggccaagatccaggataaagaaggcatccctcccgaccagcagaggctcatctttgcaggcaagcagctggaagatggccgcactctttctgactacaacatccagaaggagtcgaccctgcacctggtcctgcgtctgagaggtggtatgcagatcttcgtgaagaccctgaccggcaagaccatcactctggaggtggagcccagtgacaccatcgaaaatgtgaaggccaagatccaagataaagaaggcatcccccccgaccagcagaggctcatctttgcaggcaagcagctggaagatggccgcactctttctgactacaacatccagaaagagtcgaccctgcacctggtcctgcgcctgaggggtggctgttaattcttcagtcatggcattcgcagtgcccagtgatggcattactctgcactatagccatttgccccaacttaagtttagaaattacaagtttcagtaatagctgaacctgttcaaaatgttaataaaggtttcgttgcatggta

SEQ ID NO: 7 - protein, 229 aa, Homo sapiens
MQIFVKTLTGKTITLEVEPSDTIENVKAKIQDKEGIPPDQQRLIFAGKQLEDGRTLSDYNIQKESTLHLVLRLRGGMQIFVKTLTGKTITLEVEPSDTIENVKAKIQDKEGIPPDQQRLIFAGKQLEDGRTLSDYNIQKESTLHLVLRLRGGMQIFVKTLTGKTITLEVEPSDTIENVKAKIQDKEGIPPDQQRLIFAGKQLEDGRTLSDYNIQKESTLHLVLRLRGGC

SEQ ID NO: 8 - DNA, 392 bp, Homo sapiens
  CDS (36)..(314)
cttcctttctgggctcggacctaggtcgcggcgacatggccaaacgtaccaagaaagtcgggatcgtcggtaaatacgggacccgctatggggcctccctccggaaaatggtgaagaaaattgaaatcagccagcacgccaagtacacttgctctttctgtggcaaaaccaagatgaagagacgagctgtggggatctggcactgtggttcctgcatgaagacagtggctggcggtgcctggacgtacaataccacttccgctgtcacggtaaagtccgccatcagaagactgaaggagttgaaagaccagtagacgctcctctactctttgagacatcactggcctataataaatgggttaatttatgtaacaaaaaaaaaaaaaaaaaaa

SEQ ID NO: 9 - protein, 92 aa, Homo sapiens [sequence omitted]

SEQ ID NO: 10 - DNA, 685 bp, Homo sapiens
  misc_feature (411)..(411): n is a, c, g, or t
  misc_feature (524)..(524): n = a or t or g or c
  misc_feature (524)..(524): n is a, c, g, or t
gagagagagagaactagtctcgagttttttttttttttggtttttccctcttgtgctcagtcgccctgttcttgaggtctcttttctctactccatggttctcaatttatttggggggaaataccttgagcagaatacaatgggaaaagagtctctacccctttctgttcgaagttcatttttatcccttcctgtctgaacaaaaactgtatggaatcaacaccaccgagctctgtgggaaaaaagaaaaacctgctcccttcgctctgctggaagctggagggtgctaggcccctgtgtagtagtgcatagaattctagcttttttcctcctttctctgtatattgggctcagagagtacactgtgtctctatgtgaatatggacagttagcatttaccaacatgtatcntgctactttctcttgttaaaaaaaaaaaaaaaaaactcgagggggggcccggtacccaattcgccctatagtgagtcgattacaattcactggccgtcgttttacaacgtcgngactgggaaaaccctgcgttacccaacttatcgccttgcagcacatcccccttcgccagcttgcggaataaccgaaaagcccgcaccggtcgcctttccaccagttcgcagcctgaatgcaaatgcaaaattgaagccgtatatttggtaaaaatcgcggt

SEQ ID NO: 11 - DNA, 944 bp, Homo sapiens
actattagccatggtcaaccccaccgtgttcttcgacatgccgtcgacggcgagccctgggccgcgtctccttgagctgttgcagacaaggtcccaaagacagcagaaaattttcgtgctctgagcactggagagaaaggattggttataagggttcctgctttcacagaattattccaggtttatgtgtcagggtggtgacttcacacgccataatggcactggtggcaagtccatctatggggagaaatttgaagatgagaacttcatcctaaagcatacgggtcctggcatcttgtccatggcaaatgctggacccaacacaaatggttcccagtttttcatctgcactgccaagactgagtggttggatggcaagcatgtggtgttggcaaagtgaaagaaggcatgaatatgtggaggccatggagcgcttgggtccaggaatggcaagaccagcaagaagatcaccatgctgactgtggacaactcgaataagttgacttgtgttttatcttaaccaccagatcattccttctgtagctcaggagagcacccctccaccccattgctcgcagtatcctagaatcttgtgctctcgctgcagttccccttgggttccatgttttccttgttccctcccatgctagctggattgagagttaagtttatgattatgaaataaaaaactaaataacaatgttctcgttgagttaagtgttgatgtaggctttatttaaagcaggaatgggtgacttctggaacatcacttgttgcttaatctacacagacttgaattttttacttccagtccaggagtcagttgtgcgtggattcgtcatgtgggggcggggtgtgggccgctgggtttcgggggaacccgggggggtaacaccggggggtggggttcaaaaatcgcgggggcgcaacaggggggggggaca

SEQ ID NO: 12 - DNA, 1466 bp, Homo sapiens
  CDS (107)..(367)
ggggctgctgggactcgtcgtcggttggcgactcccggacgttaggtagtttgttgggccgggttctgaggccttgcttctctttacttttccactctaggccacgatgccgcagtaccagacctgggaggagttcagccgcgctgccgagaagctttacctcgctgaccctatgaaggcacgtgtggttctcaaatataggcattctgatgggaacttgtgtgttaaagtaacagatgatttagtttgtttggtgtataaaacagaccaagctcaagatgtaaagaagattgagaaattccacagtcaactaatgcgacttatggtagccaaggaagcccgcaatgttaccatggaaactgagtgaatggtttgaaatgaagactttgtcgtgtacttaggaagtaaatatcttttgaattagagaaaggttgggacagaaagtactttatgtaactaagtgggctgttcagaagcttagaggtcattttttgtaattttctttttaattactttagagagctagggatgcaaatgttttcagttagaaagcctttatttacttttggaaattgaacaagaaatgcatctgtcttagaaactggagattatttgatgttaggtaaaacatgtaattgtttctctggcaaatttgtatcagtaatttgaaaatgagatattaggaaaaaccaattcttcttaaatttagttcatctttctttaaaagaacattaaatgtaaccattttgtcagatccatgtattttggagcataaaatgtatgctgttgtgaccaataaatataaaatatggtaattggaattaactccacaccatagtatgcattgttatacatactgtgtacctaattatgtatagcagtgtagtctcaattatatctgaaagtaattgtgactaacaagtatgctttgccttatttccacatttaaactacctgttaatataagggatttgtagtatcagcttgttgagcaatgactttgaatctagttttcagtgatcagaagcagcagttatttgagtgtatgaatggaatgatgatcactgtgctataatgtactgaaaccaccatattacagaaatatttactacatattttccatctgtagtttctcagaagggctatggattagtttgaactgtcaaatccttgcatacttctgtgacacccctgcccattttctgtctttaattaaccaaggtgttaggtgtgactgtcacaactgttatgttttccagtaaactagaagcacgatatttgataattatatttgtatttcaccacctaaatgtaatgttgattcctcaagaatgaaatgaaggcactacattgaaatatgttttgtataaatttgtcatgttgaacagcattttagcatggtaagttcccttagctatatgaattttggcatgtttcagagagatcagtaaataaaatattagata

SEQ ID NO: 13 - protein, 86 aa, Homo sapiens
MPQYQTWEEFSRAAEKLYLADPMKARVVLKYRHSDGNLCVKVTDDLVCLVYKTDQAQDVKKIEKFHSQLMRLMVAKEARNVTMETE

SEQ ID NO: 14 - DNA, 1867 bp, Homo sapiens
  CDS (297)..(1349)
tgtggacgctgtgaatcgtggctggcccggttctccgcttctccccatcccctactttcctccctccctccctttccctccctcgtcgactgtttcttgctggtcgcagactccctgacccctccctcacccctccctaacctcggtgccaccggattgcccttcttttcctgttgcccagcccagccctagtgtcagggcgggggcctggagcagcccgaggcactgcagcagaagagagaaaagacaacgacgaccctcagctcgccagtccggtcgctggcttcgccgccgccatggcaatgagacagacgccgctcacctgctctggccacacgcgacccgtggttgatttggccttcagtggcatcacgccttatgggtatttcttaatcagcgcttgcaaagatggtaaacctatgctacgccagggagatacaggagactggattggaacatttttgggtcataaaggtgctgtttggggtgcaacactgaataaggatgccaccaaagcagctacagcagctgcagatttcacagccaaagtgtgggatgctgtctcaggagatgaattgatgaccctggctcataaacacattgtcaagactgtggatttcacgcaggatagtaattatttgttaaccgggggacaggataaactgttacgcatatatgacttgaacaaacctgaagcagaacctaaggaaattagtggtcatacttctggtataaaaaaagctctgtggtgcagtgaggataaacagattctttctgctgatgacaaaactgttcgactttgggatcatgctactatgacagaagtgaaatctctaaattttaatatgtctgttagtagtatggaatatattcctgagggagagattttggttataacttatggacgatctattgcttttcatagtgcagtaagtttggacccaattaaatcctttgaagctcctgcaaccatcaattctgcatctcttcatcctgagaaagaatttcttgttgcaggcggtgaagattttaaactttataagtatgattataatagtggagaagaattagaatcctacaagggacactttggtcctattcactgtgtgagatttagtcctgatggagaactctatgccagtggttcagaagatggaacattgagactatggcaaactgtggtaggaaaaacgtatggcctttggaaatgtgtgcttcctgaagaagatagtggtgagctggcaaagccaaagattggttttccagagacaacagaagaggagctagaagaaattgcttcagagaattcagagtgcatctttccttcagctcctgatgttaaggcctgagcgtcaatcatatgttgcagttagtatacaactgactaaaacaagcaagcagagaaaagcatcagccttccagagttactgtctgcttaaggcagaaacagcagtaaataatgaggaaaatgaattagctccagtgctggaacaactaactaacttggtgttacctgtaagtgaaaactcaagtgtcagatgaagggaggtggagttatcctcttatagtacagtggcctgttatctttttaatgaatatatacaagccaacatccaatttctattattacaattagggttcttgtagctgtttatgttaatatggagaagaaaactatattggctgatttttttctgatcttaaagcagaatgccttttctttttttgcttcagttgtaaagaagagggaatacatgataaagtaactggtttgatttctcgttcattgtacactgcctctgaacatctaattgtttttagttgtctaaataaaatgcctctaaaacaaaaaaaaaaaaaaaaaaaa

SEQ ID NO: 15 - protein, 350 aa, Homo sapiens
MAMRQTPLTCSGHTRPVVDLAFSGITPYGYFLISACKDGKPMLRQGDTGDWIGTFLGHKGAVWGATLNKDATKAATAAADFTAKVWDAVSGDELMTLAHKHIVKTVDFTQDSNYLLTGGQDKLLRIYDLNKPEAEPKEISGHTSGIKKALWCSEDKQILSADDKTVRLWDHATMTEVKSLNFNMSVSSMEYIPEGEILVITYGRSIAFHSAVSLDPIKSFEAPATINSASLHPEKEFLVAGGEDFKLYKYDYNSGEELESYKGHFGPIHCVRFSPDGELYASGSEDGTLRLWQTVVGKTYGLWKCVLPEEDSGELAKPKIGFPETTEEELEEIASENSECIFPSAPDVKA

SEQ ID NO: 16 - DNA, 595 bp, Homo sapiens
ttttttttttttttttttttttttttttggaatgggacacaaacatttcctacataatccaacatacaacagagaaaggggacatttttttttttcaatttgcatacaagggaaaaacaagtatatatatattttacaaagtttaactaataagacactagagcaaattgacagtttaagtctatgggggagaaattatctaataaaaataatcaattttttcagcattagccacttccataaccaagggttattctgattaataaaacttgctgccaatcagaattctggtatatactcataccattactcaacttgtagtactgctccccaccttagttcttcacaactaacatagaaaattgttgaaaagggggggcaagcttttgcaaaaacaaacaaaaaatccccagcttattataagcatgaatatgtatgagggaaatttcttccagcaatagacttccaaaccatcaagaaatcaccagaactaaagttgccaagttattttggctatgtccaacaagagatgcacctatatgtccaacagaagagctgaaaattaaacctagtgttagttttgggggtgggttgg

SEQ ID NO: 17 - DNA, 955 bp, Homo sapiens
ggactggctaaggacgatcagctgaaggttcatgggttttaagtgcttgtggctcactgaagcttaagtgaggatttccttgcaatgagtagaatttcccttctctcccttgttcacaggtttaaaaacctcacagcttgtataatgtaaccattgtgggtccgcttttaactgtggactagtgtaaactccttcatgcaataaactggaaaagagcaaaaaaaaaaaaaaacaaaaaacaaaaacattttgtggggcgggctcggggcccctggggaaagaggttttttaaaaccccaattcggtggggggccggggcgccccatgtgggttacggggcaccttggggccataacgcggggtccccaaggggaaattcgcggccaatggactcagggcggctgggcttctccaccaattaaaaaaacgcgccgggcgggaaacaccgagcgcggcttcgtgaaccaactgcccaaagggggtacggcgagggccactaaggggaccttatcaaaacggggtgccacggggagccgaaataattaaaatagcgcgcggcgaggggagagaacagagaagcaagaatgcacagaagacagcagcagagcaaggcgcaccgacgacaccacacgaccaaacaacatacacacagcagcaacgtagtgagaccgccacgagcacgacagccgcacggagtcgcggaacgccgcgcagcccaggcacgccggcgtcgaacaacccagcagaagagccggagagctgagcaccggcaaagaaaagccagtaacgaagaggagctagaccaccccctgcgcacacagccagcacaacgcgcactaacacacgacataagtcacgtaacgcagcccgtacggccaaacaaagccccaagacgagcacacacacacggcacacgtagcaccaagtagcatagagggatgcgcactagctgtac

SEQ ID NO: 18 - DNA, 479 bp, Homo sapiens
  misc_feature (233)..(233): n is a, c, g, or t
  misc_feature (385)..(385): n is a, c, g, or t
  misc_feature (439)..(439): n is a, c, g, or t
acttcaggtttctcttttaataaacaaaaccatccaaggtacagttccaaagtacaaaatcaaccaggtctgaactgattggtgataagagcacacagatcagtccttccttaaggaaacagtttcctccctgatgccctctttggtcactatgcagatccggagtgcgtccccagtgtacacatctctctcagccgcagaaatgaagacatctttcaccagccgcatggtcntgtccaaggacagcggaacatgctccacattctgcatgttcttaaaaccaacctggtgggacattgaaacttgggtcagatgtcatgtgacagtgagcacaaaggaaaggttcaagtttcttccaataccctcatgtgtacgaggatttgtnatgaaaaatactacacaaaattaaaatggtccttcagactggaataaagacccntccagacctggatgattacacacatcagaaatctggacaa

SEQ ID NO: 19 - DNA, 753 bp, Homo sapiens
  CDS (45)..(542)
gttttgcagacgccaccgccgaggaaaaccgtgtactattagccatggtcaaccccaccgtgttcttcgacattgccgtcgacggcgagcccttgggccgcgtctcctttgagctgtttgcagacaaggtcccaaagacagcagaaaattttcgtgctctgagcactggagagaaaggatttggttataagggttcctgctttcacagaattattccagggtttatgtgtcagggtggtgacttcacacgccataatggcactggtggcaagtccatctatggggagaaatttgaagatgagaacttcatcctaaagcatacgggtcctggcatcttgtccatggcaaatgctggacccaacacaaatggttcccagtttttcatctgcactgccaagactgagtggttggatggcaagcatgtggtgtttggcaaagtgaaagaaggcatgaatattgtggaggccatggagcgctttgggtccaggaatggcaagaccagcaagaagatcaccattgctgactgtggacaactcgaataagtttgacttgtgttttatcttaaccaccagatcattccttctgtagctcaggagagcacccctccaccccatttgctcgcagtatcctagaatctttgtgctctcgctgcagttccctttgggttccatgttttccttgttccctcccatgcctagctggattgcagagttaagtttatgattatgaaataaaaactaaataacaattgtc

SEQ ID NO: 20 - protein, 165 aa, Homo sapiens
MVNPTVFFDIAVDGEPLGRVSFELFADKVPKTAENFRALSTGEKGFGYKGSCFHRIIPGFMCQGGDFTRHNGTGGKSIYGEKFEDENFILKHTGPGILSMANAGPNTNGSQFFICTAKTEWLDGKHVVFGKVKEGMNIVEAMERFGSRNGKTSKKITIADCGQLE

SEQ ID NO: 21 - DNA, 3349 bp, Homo sapiens
  CDS (495)..(1985)
acttcctgccgggctgcgggcgcctgagcgctcttcagcgtttgcgcggcggctgcgcgtctctctcggctcccgcttcctttgaccgcctcccccccccggcccggcggcgcccgcctcctccacggccactccgcctcttccctcccttcgtcccttcttcctctcccttttttccttcttccttcccctcctcgccgccaccgcccaggaccgccggccgggggacgagtccggagcagcagccagcagcagccaggtggagttttgctcttgtcgcccaggctggagtgcagtggcgtgatctcggctcactgcaacctccacctcccaggtcagcgattttcccacttcagcctcccgataagctgagattacaggagtttattaaccacttaacctctcagaactgaacaaagacaacattgttcctggaacgccctctttttaaaaaagaaagcataacccctactgtagaactaaatgcactgtgcatgaaacttggaaaaaaaccaatgtataagcctgttgacccttactctcggatgcagtccacctataactacaacatgagaggaggtgcttatcccccgaggtacttttacccatttccagttccacctttactttatcaagtggaactttctgtgggaggacagcaatttaatggcaaaggaaagacaagacaggctgcgaaacacgatgctgctgccaaagcgttgaggatcctgcagaatgagcccctgccagagaggctggaggtgaatggaagagaatccgaagaagaaaatctcaataaatctgaaataagtcaagtgtttgagattgcacttaaacggaacttgcctgtgaatttcgaggtggcccgggagagtggcccaccccacatgaagaactttgtgaccaaggtttcggttggggagtttgtgggggaaggtgaagggaaaagcaagaagatttcaaagaaaaatgccgccatagctgttcttgaggagctgaagaagttaccgcccctgcctgcagttgaacgagtaaagcctagaatcaaaaagaaaacaaaacccatagtcaagccacagacaagcccagaatatggccaggggatcaatccgattagccgactggcccagatccagcaggcaaaaaaggagaaggagccagagtacacgctcctcacagagcgaggcctcccgcgccgcagggagtttgtgatgcaggtgaaggttggaaaccacactgcagaaggaacgggcaccaacaagaaggtggccaagcgcaatgcagccgagaacatgctggagatccttggtttcaaagtcccgcagcggcagcccaccaaacccgcactcaagtcagaggagaagacacccataaagaaaccaggggatggaagaaaagtaaccttttttgaacctggctctggggatgaaaatgggactagtaataaagaggatgagttcaggatgccttatctaagtcatcagcagctgcctgctggaattcttcccatggtgcccgaggtcgcccaggctgtaggagttagtcaaggacatcacaccaaagattttaccagggcagctccgaatcctgccaaggccacggtaactgccatgatagcccgagagttgttgtatgggggcacctcgcccacagccgagaccattttaaagaataacatctcttcaggccacgtaccccatggacctctcacgagaccctctgagcaactggactatctttccagagtccagggattccaggttgaatacaaagacttccccaaaaacaacaagaacgaatttgtatctcttatcaattgctcctctcagccacctctgatcagccatggtatcggcaaggatgtggagtcctgccatgatatggctgcgctgaacatcttaaagttgctgtctgagttggaccaacaaagtacagagatgccaagaacaggaaacggaccaatgtctgtgtgtgggaggtgctgaaccttttctggccatgaaccattataaaatcccaacatatatactgaaaatactgaaactgctttgaaaatttggaatttctgatacctccagtgggccgagagacacggtgggtaaaggatgtgggcagcagcagggaagacaacagaaacacaaggaggcggctgtggccggctggactgtgctggggtttgttgtgatggccactcggtgacctggcggtccctacgcaatagcagctgcctgtggggaagaagggctgcccagccagctggttctcccgggacaccagcagatccacaccctgggcacctccgtgtttggtcttttttttcccctgtgtgaaagaagaaacggcacgaccccttctcaagctggctcactcagacacattgggacaaaccctggacagccatgccagagagaggcctttgaccggccccagagctaaaagcaccagagaaaatcaaatgcttcctactcagcgtgacccaacttttctagtgtgccacggccccaccacctcctgcagtacccacaccatcaccactgctttctcttccaacagtgatctgtattcttagtttcattattttcttttgattgatatgacactatataaaattttcatttgagaatttctcaattgtatctagttaaatagcacagtttggaaacttgtctgagactgactttatcaataatctaaccgacaaagatcatatccatgtgtatgtggttagacatttttatttcattgactaacccaggacagtttcagtgatgcaaattgtgtgccctctggttcagctgaaacagtcctggactttcaaaaaccttgaataagtctcccacagttgtataaattggacaatttaggaattttaaactttagatgatcatttggttccatttttatttcatttttatttttgttaatgcaaacaggacttaaatgaactttgatctctgttttaaagattattaaaaaacattgtgtatctatacatatggctcttgaggacttagctttcactacactacaggatatgatctccatgtagtccatataaacctgcagagtgattttccagagtgctcgatactgttaattacatctccattagggctgaaaagaatgacctacgtttctgtatacagctgtgttgcttttgatgttgtgttactgtacacagaagtgtgtgcactgaggctctgcgtgtggtccgtatggaaaacctggtagccctgcgagttaagtactgcttccattcattgtttacgctggaatttttctccccatggaatgtaagtaaaacttaagtgtttgtcatcaataaatggtaatactaaaaaaaaaaaaa

SEQ ID NO: 22 - protein, 496 aa, Homo sapiens
MKLGKKPMYKPVDPYSRMQSTYNYNMRGGAYPPRYFYPFPVPPLLYQVELSVGGQQFNGKGKTRQAAKHDAAAKALRILQNEPLPERLEVNGRESEEENLNKSEISQVFEIALKRNLPVNFEVARESGPPHMKNFVTKVSVGEFVGEGEGKSKKISKKNAAIAVLEELKKLPPLPAVERVKPRIKKKTKPIVKPQTSPEYGQGINPISRLAQIQQAKKEKEPEYTLLTERGLPRRREFVMQVKVGNHTAEGTGTNKKVAKRNAAENMLEILGFKVPQRQPTKPALKSEEKTPIKKPGDGRKVTFFEPGSGDENGTSNKEDEFRMPYLSHQQLPAGILPMVPEVAQAVGVSQGHHTKDFTRAAPNPAKATVTAMIARELLYGGTSPTAETILKNNISSGHVPHGPLTRPSEQLDYLSRVQGFQVEYKDFPKNNKNEFVSLINCSSQPPLISHGIGKDVESCHDMAALNILKLLSELDQQSTEMPRTGNGPMSVCGRC

SEQ ID NO: 23 - DNA, 3349 bp, Homo sapiens; identical to SEQ ID NO: 21
  CDS (495)..(1985)

SEQ ID NO: 24 - protein, 496 aa, Homo sapiens; identical to SEQ ID NO: 22

SEQ ID NO: 25 - DNA, 1389 bp, Homo sapiens
  CDS (38)..(766)
ctgcgctgtctctccgatggcgtccgcctcaggggccatggcgaagcacgagcagatcctggtcctcgatccgcccacagacctcaaattcaaaggccccttcacagatgtagtcactacaaatcttaaattgcgaaatccatcggatagaaaagtgtgtttcaaagtgaagactacagcacctcgccggtactgtgtgaggcccaacagtggaattattgacccagggtcaactgtgactgtttcagtaatgctacagccctttgactatgatccgaatgaaaagagtaaacacaagtttatggtacagacaatttttgctccaccaaacacttcagatatggaagctgtgtggaaagaggcaaaacctgatgaattaatggattccaaattgagatgcgtatttgaaatgcccaatgaaaatgataaattgaatgatatggaacctagcaaagctgttccactgaatgcatctaagcaagatggacctatgtcaaaaccacacagtgtttcacttaatgataccgaaacaaggaaactaatggaagagtgtaaaagacttcagggagaaatgatgaagctatcagaagaaaatcggcacctgagagatgaaggtttaaggctcagaaaggtagcacattcggataaacctggatcaacctcaactgcatccttcagagataatgtcaccagtcctcttccttcacttcttgttgtaattgcagccattttcattggattctttctagggaaattcatcttgtagagtgaagcatgcagagtgctgtttctttttttttttttctcttgaccagaaaaagatttgtttacctaccatttcattggtagtatggcccacggtgaccatttttttgtgtgtacagcgtcatataggctttgcctttaatgatctcttacggttagaaaacacaataaaaacaaactgttcggctactggacaggttgtatattaccagatcatcactagcagatgtcagttgcacattgagtcctttatgaaattcataaataaagaattgttctttctttgtggttttaataagagttcaagaattgttcagagtcttgtaaatgttattttaataatccctttaaattttatctgttgctgttacctcttgaaatatgatttatttagattgctaatcccactcattcaggaaatgccaagaggtattccttggggaaatggtgcctcttacagtgtaaatttttcctcctttacctttgctaatatcatggcagaatttttcttatcccttgtgaggcagttgttgactgagtttttcatccttacaatcctgtcccatggtatttaacataaaaaaaaataaaactgttaacagaaaaaaaaaaaaaaaaaaaaaa

SEQ ID NO: 26 - protein, 242 aa, Homo sapiens [sequence omitted]

SEQ ID NO: 27 - DNA, 1260 bp, Homo sapiens
aacaccaggacttaagacaaatgggactgatgtcatcttgagctcttcatttattttgactgtgatttatttggagtggaggcattgtttttaagaaaaacatgtcatgtaggttgtctaaaaataaaatgcatttaaactccaaaaaaaaaaaaaaaaaaaacaacaaaaaaaaaagctgtgttgcggccgcgcccgcgcggccgccttcagagagaagagctttttctagagaacccattacgcgttgtgaggcgcgccgcgggcccccccaggtggcgtacaaccgtgaaaacccgtgtggcccacagagcgtgtgttccgccagaggaagaaccccgcgggtccaggtgaacaacaggcgccggagagaattctccccaccccaacattacaaagagacgcccgcggagaggaaacacccgggagagcgcgttcttgtgaacacaaaactccccagaagggagagactatccagaggagggccacactatcacgggggacatcacttatccaacaaccgggggagagcccccacagggggcgagagcctgccgaaataaatctacaaagatattattaaagcggccccaccagggccctcggggggtgaagggcaatgctagatgacagaccaacaatgaacacagaagcaaagagaacgaagaaacgaaaaaaacacagcgcaactagcagacaacagaccacaagaaccaaacaagaacagacaagcataaaccaagctgacgaacagagacaacaccaataaacgacaaagccacaagcaaacaataagaaataagaaacaatagaaggcgggggacggcaggagagcaagagggcagaagagggaggggagagcaaaggagaagaaagaggggcgaaggcggagagaagaaaagcaggggagacagggacagacgagcgaggagggaggagcgagaggagagagagagtggaagcggaaaaaagagaaggagaagaagcgaaacgacaacagggagacaacacaacacgcgcgaagacgcagccagcagcgagacaccggaccaaagaaccacgaggcacggaaggcaacagagaaagcaaaaacccgaacaggaaagagcggggcgaacaaaggagaacggcagggaggcagaggaaggagggaggacgcgagggaacgaggaggaggaagaaaagaggagcaggggaagagggagggggagaggagggcgggcggctaacagaccacacgcagcagcatacacggaaaag

SEQ ID NO: 28 - DNA, 921 bp, Homo sapiens
  CDS (43)..(837)
cgcgactcccacttccgcccttttggctctctgaccagcaccatggcggttggcaagaacaagcgccttacgaaaggcggcaaaaagggagccaagaagaaagtggttgatccattttctaagaaagattggtatgatgtgaaagcacctgctatgttcaatataagaaatattggaaagacgctcgtcaccaggacccaaggaaccaaaattgcatctgatggtctcaagggtcgtgtgtttgaagtgagtcttgctgatttgcagaatgatgaagttgcatttagaaaattcaagctgattactgaagatgttcagggtaaaaactgcctgactaacttccatggcatggatcttacccgtgacaaaatgtgttccatggtcaaaaaatggcagacaatgattgaagctcacgttgatgtcaagactaccgatggttacttgcttcgtctgttctgtgttggttttactaaaaaacgcaacaatcagatacggaagacctcttatgctcagcaccaacaggtccgccaaatccggaagaagatgatggaaatcatgacccgagaggtgcagacaaatgacttgaaagaagtggtcaataaattgattccagacagcattggaaaagacatagaaaaggcttgccaatctatttatcctctccatgatgtcttcgttagaaaagtaaaaatgctgaagaagcccaagtttgaattgggaaagctcatggagcttcatggtgaaggcagtagttctggaaaagccactggggacgagacaggtgctaaagttgaacgagctgatggatatgaaccaccagtccaagaatctgtttaaagttcagacttcaaatagtggcaaataaaaagtgctatttgtgatggtttgcttctgaaaaaaaaaaaaaaaaaaaaaaaaaaa

SEQ ID NO: 29 - protein, 264 aa, Homo sapiens [sequence omitted]

SEQ ID NO: 30 - DNA, 2083 bp, Homo sapiens
catcaaaagaatgaagaacataagaaaaggtaactacatcagtaaatatattgcttttttcttcttatttaaatgctttaaaagagaattgattgtttaaataaaaatatcaatgtaggctacatgcagtggctcacacctataatcccagcactttgggaggctgaggtgggtggatcacttgaggtcagaatgttcaagaccagcctggccaacatggtgatctttgtgtctattaaaaaatacaaaaataagccaggcgtggtggcgggcacctgtaatccagctactctaaggctgaggcaagagatcacttgaatccaggaggcagaggctgcagtcagccaaaattactccactgccctccagcctaggcaacagagtgagaatctgtctcaaaaataaaaataaaaataaatcaatgtagtatcagacttatatgtagaaattaaatatttgacaaaataacatgaaattataaggagagaaattaaaatttattattttaaggttcttaatatacaaactagtatattatcagttgaagatagtctgcaataatttaaagctatatactataaacactaaagcaaccattaatatagcaaaattgaaaatatgaagttaatagggcaacaaaggagataaaatgtaattttaagaaatatacaaataattacaaaaagacagcataatagtaaaagagaatgaacagataaaacaattataaaacaaacaccaagctgagagacttaaacctaatcacacgataatcacactaaatgtaaatggtccaaatacccccatcaaaaaggagagactttcaaatagataatgaaaattcaagacctaaccacaaaaaaaacacacttagaatataaagtcacagatagggtaaaagtggaagaatgacaaaagaagagacattcttcaccaagagtcctcggggtttcctgcttcagcagtgcttggacggaacccggcacttgtcccccacccaggccagctgcccatagccagccctccgtcacgtcttcactgcaccctcagaccaccccaaggcccccaccgccgctccagcgccacgcagccaccgccgccgcagcctctccttagtcattgccatgatgactgcatccaactcgcaggtgcgccagaactaccaccaggactcagaggccgccatcaaccgccagatcaacctggagctctacgcctcctactttaacctctccatgtcttactactttgaccgtgatgatgcggctttgaagaactttgccaaatactttcttcaccaatctcatgaggagagggagcatgctgagaaactgatgaaactgcagaaccaacaaggtggctgaattttccttcaggatatcaagaaaccagactgatgactgggatagtgggctgaatgtgatagagtgtgcattacatttggaaaaaaatgtgaatcagtcactactggaactgcacaaactggccactgacaaaaatgacccccatttgtgtgacttcattgagacacattacctgaatgagcaggtgaaagccatcaaagaattgggtgaacgtgaccaacttgcacaagatgggagcacccgaatctggcttggcagaatatctctttgacaagcacaccctgggagaaagtgataatgaaagctaagcctcaggctaatttccccatagctgtggggtgacttccctggtcaccaaggcagtgcatgcatgttggggtttcctttaccttttctataagttgtaccaaaacatccacttaagttcttttgatttgtaccattccttcaaataaagaaatctggtacccccccccaaaaaagaatgacaaaagatagcacatgtgaatacaaataaaaagtaagctactgtggctacattcatgtcagacaaagtaaatttcagagtagagaatattaccagtaataaatgattatttcatagtgataaaggggtcaattcatgaaaaagacataatcctaaacctaatacaacagttcaaaataaatgcagcaaaaactggaaggagaaagaaacagatcctctagagtcgacctgc

SEQ ID NO: 31 - DNA, 599 bp, Homo sapiens
ttttttttagttgcagagatctacaatttattattattttcagtgttagagctagagggtaattttttcaaagatggcactcaactccacttatttacctgtcaacaaatacagaactgaactgttagccataagcactttacaaacagactcaggaaactatgcagtagacaatgacatagcttaaccagactctgaaaaagagatacatattttgattcacacttgtacaaagagaacagtcatgtctgcatgacttaaggttccctaaacacaactgttttatgttttagacccctggagtgtgccagtttaccacatcagggaggaatcaagggatgtgtgtgctccttctaaagaaccaagggcaagtggggtgggggtggctacagggaacgctctgggcaaaagagctgcctcaggtttttgtgggaatgaaaattacttgttgcagttaagcaattcctagggtttatctagtttgaggttcaaaacaaaggagagaattatttccttcctcgagctcttcccaaagcaatatgcacatctcataatcaaatctcagtagtacaaagagataatcaattatctaaaaattt

SEQ ID NO: 32 - DNA, 714 bp, Homo sapiens
  misc_feature (648)..(648): n is a, c, g, or t
ggtatttagtttttatttcattatcataaacttaactctgcaatccagctaggcatgggagggaacaaggaaaacatggaacccaaagggaactgcagcgagagcacaaagattctaggatactgcgagcaaatggggtggaggggtgctctcctgagctacagaaggaatgatctggtggttaagataaaacacaagtcaaacttattcgagttgtccacagtcagcaatggtgatcttcttgctggtcttgccattcctggacccaaagcgctccatggcctccacaatatttatgccttctttcactttgccaaacaccacatgcttgccatccaaccactcagtcttggcagtgcagatgaaaaactgggaaccatttgtgttgggtccagcatttgccatggacaagatgccaggacccgtatgctttaggatgaagttctcatcttcaaatttctccccatagatggacttgccaccagtgccattatggcgtgtgaagtcaccaccctgacacataaaccctggaataattctgtgaaagcaggaacccttataaccaaatcctttctctccagtgctcagagcacgaaaattttctgctgtctttgggaccttgtctgcaaacagctcaaaggagacgcngcccaagggctcgccgtcgacggcaatgtcgaagaacacggtggggttgaccatggctaatagtac

SEQ ID NO: 33 - DNA, 823 bp, Homo sapiens
  misc_feature (818)..(818): n is a, c, g, or t
tttttttttttttttttttttttttaaatgcattttatttttagacaacctacatgacatgtttttcttaaaaacaatgcctccactccaaataaatcacagtcaaaataaatgaagagctcaagatgacatcagtcccatttgtcttaagtcctggtgttgtgtggatgacaagcagaagccagttatgatgacaggtgatagatccaaaataattgccacatttgttaacatttttccatttctaaaccatccttaaagaaaatcatatatggggtcacaccatcctcacggtagtccaatagagcaaccatgccatctggattcatgttttcaccaataaagaactggtagtttttgaaattagcaaggatgtgcttgatttgttctgcagcccctgtcataaaaggttttactctttctggtctctgttcttcaagtttccctttgattgatttcatgtaatctttgatgtacttcttgtaggcttcttttgtgaaacttgtttcctgcaggtgatggttcatgacaatatcgacaccagtgattactgtgctttcggtaccttcgccctcggggccttcagcggaggcatttccaccaatgagcgagtcatcaatgttaccttctgtcctactgaccattttccctccacctccaggcacaacccgtccgcgatctcccggatcttgtagatgtcggagaacatctcatcgtggctgatgaggtcccggtagataatcatgatggcgactgaaaggagacgacgactgcgctagctttacacgagccctgaacttggaacgaagcgcgtgcanccgga

SEQ ID NO: 34 - DNA, 650 bp, Homo sapiens
  misc_feature (446)..(446): n is a, c, g, or t
  misc_feature (525)..(525): n is a, c, g, or t
  misc_feature (604)..(604): n is a, c, g, or t
ttcatatccatcagctcgttcaactttagcacctgtctcgtccccagtggcttttccagaactactgccttcaccatgaagctccatgagctttcccaattcaaacttgggcttcttcagcatttttacttttctaacgaagacatcatggagaggataaatagattggcaagccttttctatgtcttttccaatgctgtctggaatcaatttattgaccacttctttcaagtcatttgtctgcacctctcgggtcatgatttccatcatcttcttccggatttggcggacctgttggtgctgagcataagaggtcttccgtatctgattgttgcgttttttagtaaaaccaacacagaacagacgaagcaagtaaccatcggtagtcttgacatcaacgtgagcttcaatcattgtctgccatctcttgaccatggaacacattntggcacgggtaagatccatgccatggaagttagtcaggcagcttttaccctgaacatcttcagtaatcagcttgaattntctaaatgcatcttcatcattctgcagatcagcaagactcactttaaacacacgaccctggagaccatcagatgcaatnttgtttcctgggtcctggtgacgagcgtcttcccatattcctatat

SEQ ID NO: 35 - DNA, 3066 bp, Homo sapiens
  CDS (36)..(1526)
gcataacccctactgtagaactaaatgcactgtgcatgaaacttggaaaaaaaccaatgtataagcctgttgacccttactctcggatgcagtccacctataactacaacatgagaggaggtgcttatcccccgaggtacttttacccatttccagttccacctttactttatcaagtggaactttctgtgggaggacagcaatttaatggcaaaggaaagacaagacaggctgcgaaacacgatgctgctgccaaagcgttgaggatcctgcagaatgagcccctgccagagaggctggaggtgaatggaagagaatccgaagaagaaaatctcaataaatctgaaataagtcaagtgtttgagattgcacttaaacggaacttgcctgtgaatttcgaggtggcccgggagagtggcccaccccacatgaagaactttgtgaccaaggtttcggttggggagtttgtgggggaaggtgaagggaaaagcaagaagatttcaaagaaaaatgccgccatagctgttcttgaggagctgaagaagttaccgcccctgcctgcagttgaacgagtaaagcctagaatcaaaaagaaaacaaaacccatagtcaagccacagacaagcccagaatatggccaggggatcaatccgattagccgactggcccagatccagcaggcaaaaaaggagaaggagccagagtacacgctcctcacagagcgaggcctcccgcgccgcagggagtttgtgatgcaggtgaaggttggaaaccacactgcagaaggaacgggcaccaacaagaaggtggccaagcgcaatgcagccgagaacatgctggagatccttggtttcaaagtcccgcagcgcagccaccaaacccgcactcaagtcagaggagaagacacccataaagaaaccaggggatggaagaaaagtaacctttttttgaacctggctctggggatggaaaatgggactagtaataaagaggatgagttcaggatgccttatctaagtcatcagcagctgcctgctggaattcttcccatggtgcccgaggtcgcccaggctgtaggagttagtcaaggacatcacaccaaagattttaccagggcagctccgaatcctgccaaggccacggtaactgccatgatagcccgagagttgttgtatgggggcacctcgcccacagccgagaccattttaaagaataacatctcttcaggccacgtaccccatggacctctcacgagaccctctgagcaactggactatctttccagagtccagggattccaggttgaatacaaagacttccccaaaaacaacaagaacgaatttgtatctcttatcaattgctcctctcagccacctctgatcagccatggtatcggcaaggatgtggagtcctgccatgatatggctgcgctgaacatcttaaagttgctgtctgagttggaccaacaaagtacagagatgccaagaacaggaaacggaccaatgtctgtgtgtgggaggtgctgaaccttttctggccatgaaccattataaaatcccaacatatatactgaaaatactgaaactgctttgaaaatttggaatttctgatacctccagtgggccgagagacacggtgggtaaaggatgtgggcagcagcagggaagacaacagaaacacaaggaggcggctgtggccgggctggactgtgcgggggtttgttgtgatggccactcggtgacctggcggtccctacgcaatagcagctgcctgtggggaagaggggctgcccagccagctggttctcccgggacaccagcagatccacaccctgggcacctccgtgtttggtcttttttttcccctgtgtgaaagaagaaacggcacgaccccttctcaagctggctcactcagacacattgggacaaacctggacagccatgccagagagaggctttgaccggccccagagctaaaagcaccagagaaaatcaaatgcttcctactcagcgtgacccaacttttctagtgtgccacggccccaccacctcctgcagtacccacaccatcaccactgctttctcttccaacagtgatctgtattcttagtttcattattttcttttgattgatatgacactatataaaattttcatttgagaatttctcaattgtatctagttaaatagcacagtttggaaacttgtctgagactgactttatcaataatctaaccgacaaagatcatatccatgtgtatgtggttagacatttttatttcattgactaacccaggacagtttcagtgatgcaaattgtgtgccctctggttcagctgaaacagtcctggactttcaaaaaccttgaataagtctcccacagttgtataaattggacaatttaggaattttaaactttagatgatcatttggttccatttttatttcatttttatttttgttaatgcaaacaggacttaaatgaactttgatctctgttttaaagattattaaaaaacattgtgtatctatacatatggctcttgaggacttagctttcactacactacaggatatgatctccatgtagtccatataaacctgcagagtgattttccagagtgctcgatactgttaattacatctccattagggctgaaaagaatgacctacgtttctgtatacagctgtgttgcttttgatgttgtgttactgtacacagaagtgtgtgcactgaggctctgcgtgtggtccgtatggaaagcctggtagccctgcgagttaagtactgcttccattcattgtttacgctggaatttttctccccatggaatgtaagtaaaacttaagtgtttgtcatcaataaatggtaatactaaatttttttgttaatttattctcaaatgccactactgctaggttggtcccctcccaacttgcccctatcctttttttatttttaagaaaaaactttgtaatgcttgtgattccatctgggcaaaagtctgaagatctgaaataactttatatcaaaccattgatcaataaacagctactaatgaaaaaa

SEQ ID NO: 36 - protein, 496 aa, Homo sapiens [sequence omitted]

SEQ ID NO: 37 - DNA, 594 bp, Homo sapiens
  misc_feature (421)..(421): n is a, c, g, or t
ttcgctgccggagtcagttttattagggaagaggggctccctgcccatcccctccccacaccctccttccgggaggtctgtcagccccaactgtagaagtagattttctgccaggtgggcaagtaatccatgagcggccttgtgaccaggccaacgccagggacgtggtcggccagcaactggagcaggaagaggatcctggcctcggagaagcggtcgtagaaaggagagcgcacaggtagtagagcagcaggatggtccggcgccgcagctcccgccgctccctccgggtcaggccctttctgtcactcaggaggctcaggctggtcacgttcacaacacaagccaagagccagggtttccacgacctctgaccccacaggcccaggctgagcaagtgcagcagcggccgtggcgcggntcgacgagtcacgtactcctggtagcggaggcccaggagccgcagcttctccatcctgccctcggcaccgacagacccacagaaggaccgtacgacaggctgcggcgccctgcttcctgcggcctccttcctgcttccggtcttaggcccgcctcttggttgcttaacttccg

SEQ ID NO: 38 - DNA, 626 bp, Homo sapiens
  misc_feature (509)..(509): n is a, c, g, or t
  misc_feature (563)..(563): n is a, c, g, or t
  misc_feature (614)..(614): n is a, c, g, or t
ttttttttttttttttttggcattatggaacctttatttttcatgtgatttctgtacataaggagtatgagagtaacccttttacaaatggaactaatttactagaacaatgacaaaactgaactggtatttgatgtgaatccacaggagtttaagcttcaaatccagccaagaaatttgttacaatctctttcagctttgcatctgattgttctgagatcttttcatcagccctgatagtgcccaacaaggcttggtgctggctgacgacatgagacaagaaagcattctcaaactttgtaatcttgctgggctccagtttatcaagatatccccttacacccgcatagataacagccacttgttcttcaatagccatgggagaatactgtccttgcttcagcaactcagttagacgcacgccacgactcaaaagttgttgagtggcagcatcgaggtcagaaccgaactgggcaaaagcaagaaccctacgatactgggcgcaatancagcgtttatgtacctgctaccctgcgttataggcctggttgtgggaagcgatnccacacgagaacaaccagacaacgttattgcgagcgcgatgtccttgtganaacattatctgt

SEQ ID NO: 39 - DNA, 358 bp, Homo sapiens
  CDS (75)..(287)
ggcacgaggctctagggtgatacgtgggtgagaaaggtcctggtccgcgccagagcccagcgcgcctcgtcgccatgcctcggaaaattgaggaaatcaaggacttcctgctcacagcccgacgaaaggatgccaaatctgtcaagatcaagaaaaataaggacaacgtgaagtttaaagttcgatgcagcagatacctttacaccctggtcatcactgacaaagagaaggcagagaaactgaagcagtccctgccccccggtttggcagtgaaggaactgaaatgaaccagacacactgattggaactgtattatattaaaatactaaaaatccaaaaaaaaaaaaaaaaaaaaaaa

SEQ ID NO: 40 - protein, 70 aa, Homo sapiens [sequence omitted]

SEQ ID NO: 41 - DNA, 626 bp, Homo sapiens; identical to SEQ ID NO: 38
  misc_feature (509)..(509): n is a, c, g, or t
  misc_feature (563)..(563): n is a, c, g, or t
  misc_feature (614)..(614): n is a, c, g, or t

SEQ ID NO: 42 - DNA, 928 bp, Homo sapiens
agctcctgccctcctaaagctgaagccaaagcgaaggctccaaaggccaagaaggcagtgtggaaaggtgtccacaggccacgaaaagaagaagatccgcacgtcacccaccttccggcggccgaagagccagtgcgactccggagacagcccaaatatcctcggccaagagcgctcccaggagaaactaagcttgagcgacgtatgctatcatcaagtttccgcgtgaccacgtgagtctgccatgaagaagatagagagacaacaacacacttgtgtgcattgtggatgttaaagccaacaagcaccagattaaagcaggctgtgaagaagctgtatgaccattgatgtggccaaggtcaacaccctgattcgggctgatggagagaagaaggcatatgttcggactggctcctgattgacgatgctttggatggttgccaacaaaattgggatcatctaagactgagtccagctgcctgaattctgaatatatatatatatatatcttgtgtcaccataccaaccaaaacaagcgccccagaaaaaaacaaagtgaaccccccggcggcctgtggccgccgggccgcaaaacacgggtaaaagacggacccgcacgtgcgtgaaaccccctgtcaacgacaaaaccgtgtctttcctccaaacagcggtgaggatgggcccagaacgtagtccacacagagcaagggcgcgacccagcgagaacagcggagggacccccagcaggtatagaacagcacgcgtgcgacgacctgctgagcgatctgaattgcccagcgcgacgacctgcgccccaggggcacggacacgcacgcaccggaaagcgcaacaagcccccacgcaaacacggacgtccaaccacgaacaacacagccacatagaaaccaacccccgctcgacactgcga

SEQ ID NO: 43 - DNA, 3698 bp, Homo sapiens
  CDS (6)..(2468)
gcaagatggacgcgggatttttccgcggaacaagtgcagaacaggataatcggttcagcaacaaacagaagaaactactgaagcagctgaaatttgcagaatgcctagaaaaaaaggtggacatgagcaaagtaaatttggaggttataaagccttggataacaaaaagagtaacggaaatccttgggtttgaagatgatgttgtgattgagtttatattcaaccagctggaagtgaagaatccagactccaaaatgatgcaaatcaacctgactggatttttgaatggaaaaaatgctcgagaatttatgggagaactgtggcccctgctgctaagtgcacaagaaaacatcgcgggaatcccttctgctttcctagaactgaagaaagaagaaataaaacaaagacagattgaacaagaaaaactggcatctatgaaaaagcaagatgaagacaaagataaaagagataaggaagaaaaagaaagcagcagagaaaaaagggagcggtctcgtagcccaagaagacgcaaatccagatctccttcccctagaagacgatcttcccctgtcaggagagagagaaagcgcagtcattctcgatctccccgtcacagaaccaagagccggagtccttcccctgctccagaaaagaaggaaaaaactccagagctcccagaaccttcagtgaaagtaaaagaaccttcagtacaagaggctacttctactagtgacattctgaaagttcccaaacctgaacctataccagagcctaaagaaccttctccggaaaaaaattccaaaaaagaacaggagaaggagaagacccgaccacgatctcggtcacgctccaaatcaagatcccggacgcggtcccgctctccttctcacactcgacctagacggcgccatagatccgataagatgtattcacctagaaggcggccaagcccaagaaggcggccatctcctcgaagaagaactccgccaagaagaatgcctcctccaccaaggcatagaaggagtagatctccagtaagacgaagaagacgttcgtcagcatccttgtctgggagtagctcatcatcctcttcatctcgttcacggtcaccaccaaagaagcctcccaagaggacatccagcccccctcggaaaactcgtaggttatctccttcagcaagtcctccaaggcgaaggcacaggccatcacctcctgcaacaccacccaaaactcgggattcccctacaccccagcagtcaaaccgtacaagaaaaagtcgtgtttctgtgtctccagggagaacttcaggtaaagtgacaaaacataaaggtactgagaaaagagaatccccttcaccagcaccgaagcctagaaaagtagagttatctgaatcggaagaagataaaggtggcaaaatggctgcagcagattctgtgcagcagagacgccaatacagacgacaaaaccagcagtcttcatctgactctggctcctcctcctcctcagaagatgaacgacccaagagatcccatgtgaagaatggtgaggttggcaggcggcggagacattccccttcccggagtgcttctccatcaccacgaaagcgccaaaaagagacttcccctcgtggtagacggaggagaagtccatccccaccacccaccagaaggcgacggtctccttctcccgcccctcctcctcgacggcgcaggactcccacaccaccaccacgacgaaggactccttctcctcccccacgtcggcgctcaccttctcctagaagatactctcctccaatacagaggagatactctccttctccacctccaaagagaagaacggcttcacctcctccccctcctaaacgaagagcatcaccatctccaccaccaaagcggcgggtctcccattctccacctcccaaacaaagaagctccccagtcaccaagagacgttcaccttcattatcatccaagcataggaaagggtcttccccaagccgctctacccgggaggcccgatcaccacaaccaaacaaacggcattcgccctcaccacggcctcgagctcctcagacctcctcaagtcctccacccgttcgaagaggagcgtcgtcatcaccccaaagaaggcagtccccgtctccaagtactaggcccattaggagagtctccaggactccggaacctaaaaagataaaaaaggctgcttccccaagcccacagtctgtaagaagggtctcatcctcccgatctgtctccgggtctcctgagccagcagctaaaaagcccccagcacctccatcccccgtccagtctcagtcaccgtctacaaactggtcaccagctgtaccggtcaaaaaggccaaaaagcccaacaccgagcccatcaccgccaagaaattcagatcaggaaggaggtggaaagaaaaagaagaaaaagaaggacaagaaacacaaaaaggataagaagcacaagaagcacaaaaaacacaagaaggaaaaggctgtggctgcagctgctgcagctgctgtgacccctgcagccattgcagctgccacaaccacattagcacaggaagagccagtggcagcgccagagccgaagaaggagactgaaagtgaagctgaagataaccttgatgatttagaaaagcacctgcgtgaaaaggccctgagatcaatgaggaaggcccaagtgtccccacagtcttagggggaaatgtttgttatgatgtaaattttatttggtttgtacgcagttcaatttcaaaattgctaaaatgtgtttgagctttagactataacatttgttgtaataattgctaggttgaagttcaacatgtaaaaaaagggggcatggatttacattgcaaaaggtgtccacagtgtattagtgacattctttcattgacagctgacataattcattgagtgaaatattttaagccaaaaaaaaattccctttttaaaaaagggggtttaaatactgttggcatttttatggttcctttaaatgccctagaattcccagaggggttttttgtttgtttttttggttttgattttctttttgtttttctttcttcttcttatttttttcatttgagtcttagctcccatttaagttatgcttctgaccttgtatggtctgtaagcttgcccagaaataagaccactgttttgaactaccacaaaagtataaatgaatattttaatgccacaatctttcctgttgcctgtggagtctctgctgaaatgaatcaggattcgagctctaggatgagacagaaaatgaaagcatgttgtttgccaggacactgtgggtttatattgatgtgtaacaagttgatttggaacactggactctcattctgttattctggcttcgccccttttgttccccctccttcttttgtaaaggcaatgagctagtcccagaaaggatccttcagttacatacaatttatttaatgaaatgtcatggctctgttcatatttttgtcttgttcttccaattggtatatacaactttcagagcctcttgtatttggaaggctggaagggcccagactttggaatagtgtcttggtttcactgtttttgttttgattttttttttgttttgattttttttaaactaaagctatataaagcttgtggattaaacagaataaatttctaaatttaaaaaaaaaa

SEQ ID NO: 44 - protein, 820 aa, Homo sapiens
MDAGFFRGTSAEQDNRFSNKQKKLLKQLKFAECLEKKVDMSKVNLEVIKPWITKRVTEILGFEDDVVIEFIFNQLEVKNPDSKMMQINLTGFLNGKNAREFMGELWPLLLSAQENIAGIPSAFLELKKEEIKQRQIEQEKLASMKKQDEDKDKRDKEEKESSREKRERSRSPRRRKSRSPSPRRRSSPVRRERKRSHSRSPRHRTKSRSPSPAPEKKEKTPELPEPSVKVKEPSVQEATSTSDILKVPKPEPIPEPKEPSPEKNSKKEQEKEKTRPRSRSRSKSRSRTRSRSPSHTRPRRRHRSDKMYSPRRRPSPRRRPSPRRRTPPRRMPPPPRHRRSRSPVRRRRRSSASLSGSSSSSSSSRSRSPPKKPPKRTSSPPRKTRRLSPSASPPRRRHRPSPPATPPKTRDSPTPQQSNRTRKSRVSVSPGRTSGKVTKHKGTEKRESPSPAPKPRKVELSESEEDKGGKMAAADSVQQRRQYRRQNQQSSSDSGSSSSSEDERPKRSHVKNGEVGRRRRHSPSRSASPSPRKRQKETSPRGRRRRSPSPPPTRRRRSPSPAPPPRRRRTPTPPPRRRTPSPPPRRRSPSPRRYSPPIQRRYSPSPPPKRRTASPPPPPKRRASPSPPPKRRVSHSPPPKQRSSPVTKRRSPSLSSKHRKGSSPSRSTREARSPQPNKRHSPSPRPRAPQTSSSPPPVRRGASSSPQRRQSPSPSTRPIRRVSRTPEPKKIKKAASPSPQSVRRVSSSRSVSGSPEPAAKKPPAPPSPVQSQSPSTNWSPAVPVKKAKKPNTEPITAKKFRSGRRWKEKEEKEGQETQKG

SEQ ID NO: 45 - DNA, 826 bp, Homo sapiens
  CDS (20)..(508)
gcggcacagctacagcgaaatggcggagaccgtggctgacacccggcggctgatcaccaagccgcagaacctgaatgacgcctacggaccccccagcaacttcctcgagatcgatgtgagcaacccgcaaacggtgggggtcggccggggccgcttcaccacttacgaaatcagggtcaagacaaatcttcctattttcaagctgaaagaatctactgttagaagaagatacagtgactttgaatggctgcgaagtgaattagaaagagagagcaaggtcgtagttcccccgctccctgggaaagcgtttttgcgtcacttcccttttagaggagatgatggaatatttgatgacaattttattgaggaaagaaaacaagggctggagcagtttataaacaaggtcgctggtcatcctctggcacagaacgaacgttgtcttcacatgtttttacaagatgaaataatagataaaagctatactccatctaaaataagacatgcctgaaatttggcaagaaggggcaaaaaccgtgactattaatgattgataagcaccagtgaagaagttctaacttttagcatgctgcacagaaactggtataacatgccttcagtatactaacactccatatgctcagttttgttttgttttggcagttgacaagaagttaatttgctttagtaaaaatccctcattccagcctttctatataaatagctccttcctgctgttttaatgtgggtgcacactatagcctcacaacctggttaatccagtgtaatctgcagtgtcgtaactaaagtactggcttggtcctaattg

SEQ ID NO: 46 - protein, 162 aa, Homo sapiens [sequence omitted]

SEQ ID NO: 47 - DNA, 1448 bp, Homo sapiens
  CDS (102)..(593)
tcgacgctgtagtggcttcgtcttcggtttttctcttccttcgctaacgcctcccggctctcgtcagcctcccgccggccgtctccttaacaccgaacaccatgccttcaattaagttgcagagttctgatggagagatatttgaagttgatgtggaaattgccaaacaatctgtgactattaagaccatgttggaagatttgggaatggatgatgaaggagatgatgacccagttcctctaccaaatgtgaatgcagcaatattaaaaaaggtcattcagtggtgcacccaccacaaggatgaccctcctcctcctgaagatgatgagaacaaagaaaagcgaacagatgatatccctgtttgggaccaagaattcctgaaagttgaccaaggaacactttttgaactcattctggctgcaaactacttagacatcaaaggtttgcttgatgttacatgcaagactgttgccaatatgatcaaggggaaaactcctgaggagattcgcaagaccttcaatatcaaaaatgactttactgaagaggaggaagcccaggtacgcaaagagaaccagtggtgtgaagagaagtgaaatgttgtgcctgacactgtaacactgtaaggattgttccaaatactagttgcactgctctgtttataattgttaatattagacaaacagtagacaaatgcagcagcaagtcaattgtattagcagaatattgtcctcattgcatgtgtagttgtagctcgagtcccaaaccttacggccaagtttcttctagtatgatggaaagtttcttttttctttgctctgaataaaactgaactgtgggttctctataagtggcattttgggctttcctcccttttttgtaaagcaatgtctgcctagtttattgtccaagttaactttaggtgaccttttaaaagttggcattgaaaataaaacaacttgcaaaaaagttttctggaatagaattaacaaaatattatctttatcatgagttggaaactggaaaaaggcttcttgaagtaaatgttctgagtggagctactaggatgtcttccagcctcctgcagtcaaggagtaccactgtattgattagcctgtatgtagcagggctcccttcattgcatctgaggacttgttttctttttctttatttttaatcctcttagttttaaatatattgcctagagactcagttactacccagtttgtggttttttgggagaaatgtaactggacagttagcttttcaattaaaaagacacttaacccatgtgggatgtcatctttttataattagtgttcccatgtggagaaaattattcacactacttgcatgtaaagaataatttaacttttaacattaaaatatgtggtaaaacccagaaagcatccatcatgaatgcaagatactttcaataaagtaagttatat

SEQ ID NO: 48 - protein, 163 aa, Homo sapiens
MPSIKLQSSDGEIFEVDVEIAKQSVTIKTMLEDLGMDDEGDDDPVPLPNVNAAILKKVIQWCTHHKDDPPPPEDDENKEKRTDDIPVWDQEFLKVDQGTLFELILAANYLDIKGLLDVTCKTVANMIKGKTPEEIRKTFNIKNDFTEEEEAQVRKENQWCEEK

SEQ ID NO: 49 - DNA, 6732 bp, Homo sapiens
  CDS (1698)..(2015)
gggattgtgaatgaagaaagtgaagttttcctcccacacaggttcattggttttgtatcgaatcttgctctcctgggccttgtgcccaactgacatctggacaacaggatttgggttgctgcttattttcttccctgactttaaagctctctgaactgcagtcttcttcaagacatcggggttaaattctaatgggttactcggaaggttccttgctgaatccaagtacaagatcagcaatgcagaggaaagaccatcgttggcttggtctttgtcagctttgatgtctgttagcaccttgtcgaggtttgacgcatttggcattaacgtgagccactccagtctcaagtgtagcttccccttgggaacctcgtccagagtgaaccattcatctaaaaggcgctccttttcaacttcaatgaggtcaatcataagacttcctaaaaagtcatccttgtctgggtcttcatcaaagagctcaatctctaattcttgtccaggatgttcatacactaaagcctcatagacttcattccactttggactgaggttctccttgatgactctgctttggaagatttggttgccaactctaatgattccataggggtctgactttcccttgacaagtcccttaaggtaagtgtctttcccctgaagatcctgagcttcaataaaatgtatccttagaacaccctttggtacaggaaaccgcaactgagctatttgaacttcactgacaagtggaacggtgattcgattgggaagcaccagatagtttgatattatatccaaaatgatagtatctgataaaccattcaatccagggacatccagaagattcgtcagtcctgtccagttaatttctaaaagtggtttcctaaggaagaagatagacaaagctccaactaagggcatatctccaatcaacggttccaggatcacccgcatggtaccatgaatctggatacttttcacaccagctctacaaaaatatcgtttgatctccaaatcaatctcacaatttcctacaaaactaatctgaaggtccaaaataatttgccttttgtctacattttcagtgtataccttaacaccattgatcctgaggggctgctggcccacgtcgaccttcgtgaaactaaaggtgctaaggtgggtgtttgctccccgcacggctggttctatagtttctcgaaacaacttctctataaattggcaaatgaaaggccacatgtgttttacagtcttatttagccattctgctctttcagtgtctggaaaatgaacccaggcgggcaggtcgcaggcgcgcacccccaggcgcacgacgcgctcctcgtcttccagcagcgccagcgcgcggcacaggcgcagggccttgaggccgcggctgcggcgacaccaggcgagcagcgcgagcgcgaggagaacccagctgaagctgagccccaggtagcccagcgcgtacacgggcagcagcagcgcgaagctccgcgccagctgcgccagcagcccgggcagctccacgctcagcacgcccccggggttctcaggcgccgcgcggcccccagccccgccggcgcccgcctccgggccctcgccccgggcgccgctcatcgccccgcagtgccgcgctgccctcccggccgaggcgggctgggtgctcgcgctttcacagaattattccagggtttatgtgtcagggtggtgacttcacacgccataatggcactggtggcaagtccatctatggggagaaatttgaagatgagaacttcatcctaaagcatacgggtcctggcatcttgtccatggcaaatgctggacccaacacaaatggttcccagtttttcatctgcactgccaagactgagtggttggatggcaagcatgtggtgtttggcaaagtgaaagaaggcatgaatattgtggaggccatggagcgctttgggtccaggaatggcaagaccagcaagaagatcaccattgctgactgtggacaactcgaataagtttgacttgtgttttatcttaaccaccagatcattccttctgtagctcaggagagcacccctccaccccatttgctcgcagtatcctagaatctttgtgctctcgctgcagttccctttgggttccatgttttccttgttccctcccatgcctagctggattgcagagttaagtttatgattatgaaataaaaactaaataccaaaaaaaaaaaaaaaaaaaaaaaaagggattgtgaatgaagaaagtgaagttttcctcccacacaggttcattggttttgtatcgaatcttgctctcctgggccttgtgcccaactgacatctggacaacaggatttgggttgctgcttattttcttccctgactttaaagctctctgaactgcagtcttcttcaagacatcggggttaaattctaatgggttactcggaaggttccttgctgaatccaagtacaagatcagcaatgcagaggaaagaccatcgttggcttggtctttgtcagctttgatgtctgttagcaccttgtcgaggtttgacgcatttggcattaacgtgagccactccagtctcaagtgtagcttccccttgggaacctcgtccagagtgaaccattcatctaaaaggcgctccttttcaacttcaatgaggtcaatcataagacttcctaaaaagtcatccttgtctgggtcttcatcaaagagctcaatctctaattcttgtccaggatgttcatacactaaagcctcatagacttcattccactttggactgaggttctccttgatgactctgctttggaagatttggttgccaactctaatgattccataggggtctgactttcccttgacaagtcccttaaggtaagtgtctttcccctgaagatcctgagcttcaataaaatgtatccttagaacaccctttggtacaggaaaccgcaactgagctatttgaacttcactgacaagtggaacggtgattcgattgggaagcaccagatagtttgatattatatccaaaatgatagtatctgataaaccattcaatccagggacatccagaagattcgtcagtcctgtccagttaatttctaaaagtggtttcctaaggaagaagatagacaaagctccaactaagggcatatctccaatcaacggttccaggatcacccgcatggtaccatgaatctggatacttttcacaccagctctacaaaaatatcgtttgatctccaaatcaatctcacaatttcctacaaaactaatctgaaggtccaaaataatttgccttttgtctacattttcagtgtataccttaacaccattgatcctgaggggctgctggcccacgtcgaccttcgtgaaactaaaggtgctaaggtgggtgtttgctccccgcacggctggttctatagtttctcgaaacaacttctctataaattggcaaatgaaaggccacatgtgttttacagtcttatttagccattctgctctttcagtgtctggaaaatgaacccaggcgggcaggtcgcaggcgcgcacccccaggcgcacgacgcgctcctcgtcttccagcagcgccagcgcgcggcacaggcgcagggccttgaggccgcggctgcggcgacaccaggcgagcagcgcgagcgcgaggagaacccagctgaagctgagccccaggtagcccagcgcgtacacgggcagcagcagcgcgaagctccgcgccagctgcgccagcagcccgggcagctccacgctcagcacgcccccggggttctcaggcgccgcgcggcccccagccccgccggcgcccgcctccgggccctcgccccgggcgccgctcatcgccccgcagtgccgcgctgccctcccggccgaggcgggctgggtgctcgcgctttcacagaattattccagggtttatgtgtcagggtggtgacttcacacgccataatggcactggtggcaagtccatctatggggagaaatttgaagatgagaacttcatcctaaagcatacgggtcctggcatcttgtccatggcaaatgctggacccaacacaaatggttcccagtttttcatctgcactgccaagactgagtggttggatggcaagcatgtggtgtttggcaaagtgaaagaaggcatgaatattgtggaggccatggagcgctttgggtccaggaatggcaagaccagcaagaagatcaccattgctgactgtggacaactcgaataagtttgacttgtgttttatcttaaccaccagatcattccttctgtagctcaggagagcacccctccaccccatttgctcgcagtatcctagaatctttgtgctctcgctgcagttccctttgggttccatgttttccttgttccctcccatgcctagctggattgcagagttaagtttatgattatgaaataaaaactaaataccaaaaaaaaaaaaaaaaaaaaaaaaagggattgtgaatgaagaaagtgaagttttcctcccacacaggttcattggttttgtatcgaatcttgctctcctgggccttgtgcccaactgacatctggacaacaggatttgggttgctgcttattttcttccctgactttaaagctctctgaactgcagtcttcttcaagacatcggggttaaattctaatgggttactcggaaggttccttgctgaatccaagtacaagatcagcaatgcagaggaaagaccatcgttggcttggtctttgtcagctttgatgtctgttagcaccttgtcgaggtttgacgcatttggcattaacgtgagccactccagtctcaagtgtagcttccccttgggaacctcgtccagagtgaaccattcatctaaaaggcgctccttttcaacttcaatgaggtcaatcataagacttcctaaaaagtcatccttgtctgggtcttcatcaaagagctcaatctctaattcttgtccaggatgttcatacactaaagcctcatagacttcattccactttggactgaggttctccttgatgactctgctttggaagatttggttgccaactctaatgattccataggggtctgactttcccttgacaagtcccttaaggtaagtgtctttcccctgaagatcctgagcttcaataaaatgtatccttagaacaccctttggtacaggaaaccgcaactgagctatttgaacttcactgacaagtggaacggtgattcgattgggaagcaccagatagtttgatattatatccaaaatgatagtatctgataaaccattcaatccagggacatccagaagattcgtcagtcctgtccagttaatttctaaaagtggtttcctaaggaagaagatagacaaagctccaactaagggcatatctccaatcaacggttccaggatcacccgcatggtaccatgaatctggatacttttcacaccagctctacaaaaatatcgtttgatctccaaatcaatctcacaatttcctacaaaactaatctgaaggtccaaaataatttgccttttgtctacattttcagtgtataccttaacaccattgatcctgaggggctgctggcccacgtcgaccttcgtgaaactaaaggtgctaaggtgggtgtttgctccccgcacggctggttctatagtttctcgaaacaacttctctataaattggcaaatgaaaggccacatgtgttttacagtcttatttagccattctgctctttcagtgtctggaaaatgaacccaggcgggcaggtcgcaggcgcgcacccccaggcgcacgacgcgctcctcgtcttccagcagcgccagcgcgcggcacaggcgcagggccttgaggccgcggctgcggcgacaccaggcgagcagcgcgagcgcgaggagaacccagctgaagctgagccccaggtagcccagcgcgtacacgggcagcagcagcgcgaagctccgcgccagctgcgccagcagcccgggcagctccacgctcagcacgcccccggggttctcaggcgccgcgcggcccccagccccgccggcgcccgcctccgggccctcgccccgggcgccgctcatcgccccgcagtgccgcgctgccctcccggccgaggcgggctgggtgctcgcgctttcacagaattattccagggtttatgtgtcagggtggtgacttcacacgccataatggcactggtggcaagtccatctatggggagaaatttgaagatgagaacttcatcctaaagcatacgggtcctggcatcttgtccatggcaaatgctggacccaacacaaatggttcccagtttttcatctgcactgccaagactgagtggttggatggcaagcatgtggtgtttggcaaagtgaaagaaggcatgaatattgtggaggccatggagcgctttgggtccaggaatggcaagaccagcaagaagatcaccattgctgactgtggacaactcgaataagtttgacttgtgttttatcttaaccaccagatcattccttctgtagctcaggagagcacccctccaccccatttgctcgcagtatcctagaatctttgtgctctcgctgcagttccctttgggttccatgttttccttgttccctcccatgcctagctggattgcagagttaagtttatgattatgaaataaaaactaaataccaaaaaaaaaaaaaaaaaaaaaaaaa

SEQ ID NO: 50 - protein, 105 aa, Homo sapiens
MCQGGDFTRHNGTGGKSIYGEKFEDENFILKHTGPGILSMANAGPNTNGSQFFICTAKTEWLDGKHVVFGKVKEGMNIVEAMERFGSRNGKTSKKITIADCGQLE

SEQ ID NO: 51 - DNA, 1307 bp, Homo sapiens
  CDS (68)..(1234)
cccgctccagcccggcccgacccgaccgcacccggcgcctgccctcgctcggcgtccccggccagccatgggcccttggagccgcagcctctcggcgctgctgctgctgctgcaggtctcctcttggctctgccaggagccggagccctgccaccctggctttgacgccgagagctacacgttcacggtgccccggcgccacctggagagaggccgcgtcctgggcagagtgaattttgaagattgcaccggtcgacaaaggacagcctatttttccctcgacacccgattcaaagtgggcacagatggtgtgattacagtcaaaaggcctctacggtttcataacccacagatccatttcttggtctacgcctgggactccacctacagaaagttttccaccaaagtcacgctgaatacagtggggcaccaccaccgccccccgccccatcaggcctccgtttctggaatccaagcagaattgctcacatttcccaactcctctcctggcctcagaagacagaagagagactgggttattcctcccatcagctgcccagaaaatgaaaaaggcccatttcctaaaaacctggttcagatcaaatccaacaaagacaaagaaggcaaggttttctacagcatcactggccaaggagctgacacaccccctgttggtgtctttattattgaaagagaaacaggatggctgaaggtgacagagcctctggatagagaacgcattgccacatacactctcttctctcacgctgtgtcatcgaagaaggaagctcctgcccctcctaaagctgaagccaaagcgaaggctttaaaggccaagaaggcagtgttgaaaggtgtccacagccacaaaaagaagaagatccgcacgtcacccaccttccggcggccgaagacactgcgactccggagacagcccaaatatcctcggaagagcgctcccaggagaaacaagcttgaccactatgctatcatcaagtttccgctgaccactgagtctgccatgaagaagatagaagacaacaacacacttgtgttcattgtggatgttaaagccaacaagcaccagattaaacaggctgtgaagaagctgtatgacattgatgtggccaaggtcaacaccctgattcggcctgatggagagaagaaggcatatgttcgactggctcctgattacgatgctttggatgttgccaacaaaattgggatcatctaaactgagtccagctgcctaattctgaatatatatatatatatatcttttcaccataaaaaaaaaaaaaaaaaaa

SEQ ID NO: 52 - protein, 388 aa, Homo sapiens
MGPWSRSLSALLLLLQVSSWLCQEPEPCHPGFDAESYTFTVPRRHLERGRVLGRVNFEDCTGRQRTAYFSLDTRFKVGTDGVITVKRPLRFHNPQIHFLVYAWDSTYRKFSTKVTLNTVGHHHRPPPHQASVSGIQAELLTFPNSSPGLRRQKRDWVIPPISCPENEKGPFPKNLVQIKSNKDKEGKVFYSITGQGADTPPVGVFIIERETGWLKVTEPLDRERIATYTLFSHAVSSKKEAPAPPKAEAKAKALKAKKAVLKGVHSHKKKKIRTSPTFRRPKTLRLRRQPKYPRKSAPRRNKLDHYAIIKFPLTTESAMKKIEDNNTLVFIVDVKANKHQIKQAVKKLYDIDVAKVNTLIRPDGEKKAYVRLAPDYDALDVANKIGII

SEQ ID NO: 53 - DNA, 794 bp, Homo sapiens
  misc_feature (780)..(780): n is a, c, g, or t
ttttttttcattttaatcatgaagtttatttaaacaacaagacgctggacttgaagggaaaactatctaggattcttttttgttttagagtaatttatccctacttaaagacagattgccctacatgtaacagctacgtacaaaaaagttataaaattgtccttggttttacaatgataaatgaaaaacattaaaattctccaattgaacaaggtatgcaaggatttttatgttgttgttttttttttttgttaaaacagtgagagcaaaataacttactggaatataaagataagagctgaatgagcatgccactaatggagaaagggggtattttcacagaatcagtatttttccccatcccgtctccacttgatgtcaatcaaaacataccattggctgtttagttaaaaaaaaaaaaaaatgcaatatgcttgtgcacatataccagttactttatgtacaataaaggaatggggaagggggaaatgaaagaatagagaaaactatacggtagtagtcaggatgtggcggaaccaaattgcagccttctaattgagaatgtaatcttggtctttaaagaacagagttctggagtagagaagcaggttcccttgtcagtagacacctaccgtctgctgtcgaaacacatgaattgtatcttcatgctccatctccaactgcgcaggtgtgtctgatgcattgattggttgccctgcacatcgggatctgatcttgctcattgacaatcgcttgccgttacaaataggctttattagnttcactagggaggc

SEQ ID NO: 54 - DNA, 1490 bp, Homo sapiens
  CDS (107)..(589)
ggagagaaaaagcggagtcgccaccggagagaagtcgactccctagcagcagccgccgccagagaggcccgcccaccagttcgcccgtccccctgccccgttcacaatgcagcctgcttctgcaaagtggtacgatcgaagggactatgtcttcattgaattttgtgttgaagacagtaaggatgttaatgtaaattttgaaaaatccaaacttacattcagttgtctcggaggaagtgataattttaagcatttaaatgaaattgatctttttcactgtattgatccaaatgattccaagcataaaagaacggacagatcaattttatgttgtttacgaaaaggagaatctggccagtcatggccaaggttaacaaaagaaagggcaaagcttaattggcttagtgtcgacttcaataattggaaagactgggaagatgattcagatgaagacatgtctaattttgatcgtttctctgagatgatgaacaacatgggtggtgatgaggatgtagatttaccagaagtagatggagcagatgatgattcacaagacagtgatgatgaaaaaatgccagatctggagtaaggaatattgtcatcacctggattttgagaaagaaaaataacttctctgcaagatttcataattgagagaattcctgagttgatagctctaaaggcagatatgctgtatttgcctactttaacccatttttcaacctgtttgttttttaaaaggcttcactaagggttgatatgtaccattgtatggggcaattttaagtcagctaaggcaataaccttatgcatgaacatttcccagactttcatgaagctgttgaggtcctaggcaattaatgcagcagttgcgataaataaaaacatctcacctaagtctccttttcttcataacatagatactgacatgataggaagctctcagcttagggaaagagaataaattttagattatagaacatggattcaaaagtgactggaacaaattggctgacaccttactggtaacctgctattcttctggtgttatccttcaggattgttccactaaaatttatttttcaaaaaatttacttcacattattctatgtaagtgatgacttgtcagtgttccaggtgtatcttagctaaaactagagaatgccctaacttagatggtttttgaagcctatacaattggtattgtttgacccttaagcttttacatctcttagcatggaggacgaagaaagctgtacattgttgcttgagagtctgtacatttagtccagatttgtatttgcactgtcagtatggcaaatgagtgaaaaatgtttaatacactattggattttttatttcctttttttgattcagcttatacccgggctgaaaacctcaatttatgttcatgacagtggggatttttttaaatgtctacattctttctaataaactgttggaagacttaaaaaaaaaaaaaaaaaaaa

SEQ ID NO: 55 - protein, 160 aa, Homo sapiens
MQPASAKWYDRRDYVFIEFCVEDSKDVNVNFEKSKLTFSCLGGSDNFKHLNEIDLFHCIDPNDSKHKRTDRSILCCLRKGESGQSWPRLTKERAKLNWLSVDFNNWKDWEDDSDEDMSNFDRFSEMMNNMGGDEDVDLPEVDGADDDSQDSDDEKMPDLE

SEQ ID NO: 56 - DNA, 943 bp, Homo sapiens
  misc_feature (833)..(833): n is a, c, g, or t
gcggcggcggcgcggagagacgcagcggaggttttcctggtttcggaccccagcggccggatggtgaaatcctccctgcagcggatcctcaatagccactgcttcgccagagagaaggaaggggataaacccagcgccaccatccacgccagccgcaccatgccgctcctaagcctgcacagccgcggcggcagcagcagtgagagttccagggtctccctccactgctgtagtaacccgggtccggggcctcggtggtgctcctgatgcccctcacccacccctgaagatcccaggtgggcgagggaatagtcagagggatcacaatctttcagctaacttattctactccgatgatcggctgaatgtaacagaggaactaacgtccaacgacaagacgaggattctcaacgtccagtccaggctcacagacgccaaacgcattaactggcgaacagtgctgagtggcggcagcctctacatcgagatcccgggcggcgcgctgcccgaggggagcaaggacagctttgcagttctcctggagttcgctgaggagcagctgcgagccgaccatgtcttcatttgcttccacaagaaccgcgaggacagagccgccttgctccgaaccttcagctttttgggctttgagattgtgagaccggggcatccccttgtccccaagagacccgacgcttgcttcatggcctacacgttcgagagagagtcttcgggagaggaggaggagtagggccgcctcggggctgggcatccggcccctggggccaccccttgtcagccgggtgggtaggaaccgtagactcgctcatctcgcntgggtttgtccgcatgttgtaatcgtgcaaataaacgctcactccgaattagcggtgtatttcttgaagtttaatattgtgtttgtgatactgaagtatttgctttaatt

SEQ ID NO: 57 - DNA, 1330 bp, Homo sapiens
  CDS (49)..(1134)
gcaacctttccaagggagtggttgtgtgatcgccatcttagggaaaagatgttctcgtccgtggcgcacctggcgcgggcgaaccccttcaacacgccacatctgcagctggtgcacgatggtctcggggacctccgcagcagctccccagggcccacgggccagccccgccgccctcgcaacctggcagccgccgccgtggaagagtacagttgtgaatttggctccgcgaagtattatgcactgtgtggctttggtggggtcttaagttgtggtctgacacacactgctgtggttcccctggatttagtgaaatgccgtatgcaggtggacccccaaaagtacaagggcatatttaacggattctcagttacacttaaagaggatggtgttcgtggtttggctaaaggatgggctccgactttccttggctactccatgcagggactctgcaagtttggcttttatgaagtctttaaagtcttgtatagcaatatgcttggagaggagaatacttatctctggcgcacatcactatatttggctgcctctgccagtgctgaattctttgctgacattgccctggctcctatggaagctgctaaggttcgaattcaaacccagccaggttatgccaacactttgagggatgcagctcccaaaatgtataaggaagaaggcctaaaagcattctacaagggggttgctcctctctggatgagacagataccatacaccatgatgaagttcgcctgctttgaacgtactgttgaagcactgtacaagtttgtggttcctaagccccgcagtgaatgttcaaagccagagcagctggttgtaacatttgtagcaggttacatagctggagtcttttgtgcaattgtttctcaccctgctgattctgtggtatctgtgttgaataaagaaaaaggtagcagtgcttctctggtcctcaagagacttggatttaaaggtgtatggaagggactgtttgcccgtatcatcatgattggtaccctgactgcactacagtggtttatctatgactccgtgaaggtctacttcagacttcctcgccctcccccacctgagatgccagagtctctgaagaaaaagcttgggttaactcagtagttagatcaaagcaaatgtggactgaatctgcttgttgatcagtgtttgaagaaagtgcaaaaggaacttttatatatttgacagtgtaggaaattgtctattcctgatataattactgtagtactcttgcttaaggcaagagtttcagatttactgttgaaataaacccaactgttcatgaaaaaaaaaaaaaaaa

SEQ ID NO: 58 - protein, 361 aa, Homo sapiens
MFSSVAHLARANPFNTPHLQLVHDGLGDLRSSSPGPTGQPRRPRNLAAAAVEEYSCEFGSAKYYALCGFGGVLSCGLTHTAVVPLDLVKCRMQVDPQKYKGIFNGFSVTLKEDGVRGLAKGWAPTFLGYSMQGLCKFGFYEVFKVLYSNMLGEENTYLWRTSLYLAASASAEFFADIALAPMEAAKVRIQTQPGYANTLRDAAPKMYKEEGLKAFYKGVAPLWMRQIPYTMMKFACFERTVEALYKFVVPKPRSECSKPEQLVVTFVAGYIAGVFCAIVSHPADSVVSVLNKEKGSSASLVLKRLGFKGVWKGLFARIIMIGTLTALQWFIYDSVKVYFRLPRPPPPEMPESLKKKLGLTQ

SEQ ID NO: 59 - DNA, 550 bp, Homo sapiens
  misc_feature (398)..(398): n is a, c, g, or t
  misc_feature (414)..(414): n is a, c, g, or t
  misc_feature (423)..(423): n is a, c, g, or t
  misc_feature (451)..(451): n is a, c, g, or t
  misc_feature (516)..(516): n is a, c, g, or t
  misc_feature (523)..(523): n is a, c, g, or t
  misc_feature (531)..(531): n is a, c, g, or t
  misc_feature (542)..(542): n is a, c, g, or t
tttttttttttttttttttttttctctttaccgtttacagtttagtgaggtggtctgcattctcgcaaacgacttacaaagtacaagaaatgttgcgtgtgagtattaggcatagaatatttcattttcttacggaaggagcagcaggggacaggaaacctagtggacgccccgccaccacctttcccgaagatgcacacccccaggaacggcagtgcaaagcctggcagcaagcaacccttacaattctttttggttgtttaaaatacaagcgctttctgacatctcaccctagcgtgtgagccccactcaacctgggcaggatacaacccacgtcctcgtttagttttccccttgggaattatttacaggatgcctgacagatacggtacaaactngtatgaaattaatganagtttgcgnttccagaaacggcccccgtggttaaatntaccacgccaattccaaagaatggttcaaagttaagggtgactcagaagcattggcatccacagncggcagnaacagggntcctcgctgantgggggtg

SEQ ID NO: 60 - DNA, 2106 bp, Homo sapiens
  CDS (621)..(1817)
gtatacgaaatcataaaatctcatagatgtatcctgagtagggcggggcccgtgaaaccctctgaatctgcggccaccacccggtaaggctaaatactaatcagacaccgatagtgaactagtaccgtgagggaaaggtgaaaagaacccgagaggggagtgaaatagattctgaaaccatttacttacaagtggtccatttacttacaagtgtcagagcacgttaaagtgtgatggcgtacatcttgcagtatgggccggcgagttatgttaatatgcaaggttaagcagaaaaaagcggagccgtagggaaaccgagtctgaatagggcgactttagtatattggcatatacccgaaatcaggtgatctatccatgagcaggttgaagcttaggtaaaactaagtggaggaccgaaccgtagtacgctaaaaagtgcccggatggacttgtggatagtggtgaaattccaatcgaacctggagatagctggttctcttcgaaatagctttagggctagcgtatagtattgtttaatgggggtagagcactgaatgtggaatggcggcatctagctgtactgactataatcaaactccgaataccattaaaattaagctatgcagtcggaacgtggtatcaccattgatatctccttgtggaaatttgagaccagcaagtactatgtgactatcattgatgccccaggacacagagactttatccaaaacatgattacagggacctctcaggctgactgtgctgtcctgattgttgctgctggtgttggtgaatttgaagctggtatctccaagaatgggcagacccgagagcatgcccttctggcttacacactgggtgtgaaacaactaattgtcggtgttaacaaaatggattccactgagccaccctacagccagaagagatatgaggaaattgttaaggaagtcagcacttacattaagaaaattggctacaaccccgacacagtagcatttgtgccaatttctggttggaatggtgacaacatgctggagccaagtgctaacatgccttggttcaagggatggaaagtcacccgtaaggatggcaatgccagtggaaccacgctgcttgaggctctggactgcatcctaccaccaactcgtccaactgacaagcccttgggcctgcctctccaggatgtctacaaaattggtggtattggtactgttcctgttggccgagtggagactggtgttctcaaacccggtatggtggtcacctttggtccagtcaacgttacaacggaagtaaaatctgtcgaaatgcaccatgaagctttgggtgaagctcttcctggggacaatgtgggcttcaatgtcaagaatgtgtctgtcaaggatgttcgtcgtggcaacgttgctggtgacagcaaaaatgacccaccaatggaagcagctggcttccctgctcaggtgattatcctgaaccatccaggccaaataagcgccggctatgcccctgtattggattgccacacggctcacattgcatgcaagtttgctgagctgaaggaaaagattgatcgccgttctggtaaaaagctggaagatggccctaaattcttgaagtctggtgatgctgccattgttgatatggttcctggcaagcccatgtgtgttgagagcttctcagactatccacctttgggctgctttgctgttcgtgatatgagacagacagttgcggtgggtgtcatcaaagcagtggacaagaaggctgctggagctggcaaggtcaccaagtctgcccagaaagctcagaaggctaaatgaatattatccctaatcctcccaccccactcttaatcagtggtggaagaccggtctcagaactgtttgtttcaattgccatttaagtttagtagtaaaagactggttaatgataacaatgcatcgtaaaacctttcagaaggaaaggagaatgttttgtggacacgttggttttcttttttgcgtgtggcagttttagttattagtttttaaaatcagtactttttaatggaaacaacttgacccccaaatttgtcacagaattttgggacccattaaaaggttaactggg

SEQ ID NO: 61 - protein, 398 aa, Homo sapiens [sequence omitted]

SEQ ID NO: 62 - DNA, 605 bp, Homo sapiens
  CDS (56)..(331)
tggagaaggacgtgccgtgccgctgggttctgagccggagtggtcggtgggtgggatggaggcgaccttggagcagcacttggaagacacaatgaagaatccctccattgttggagtcctgtgcacagattcacaaggacttaatctgggttgccgcgggaccctgtcagatgagcatgctggagtgatatctgttctagcccagcaagcagctaagctaacctctgaccccactgatattcctgtggtgtgtctagaatcagataatgggaacattatgatccagaaacacgatggcatcacggtggcagtgcacaaaatggcctcttgatgctcatatctgttcttcagcagcctgtcataggaactggatcctacctatgttaattaccttatagaactactaaagttccagtagttaggccattcatttaatgtgcattaggcacttttctgtttatttaagagtcaattgcttctaatgctctatggaccgctatcaagatattagtaagaaaggatcatgttttgaagcagcaggtccaggtcactttgtaatatagaattttgctgtattcaataaatctgtttggaggaaaaaaaaa

SEQ ID NO: 63 - protein, 91 aa, Homo sapiens
MEATLEQHLEDTMKNPSIVGVLCTDSQGLNLGCRGTLSDEHAGVISVLAQQAAKLTSDPTDIPVVCLESDNGNIMIQKHDGITVAVHKMAS

SEQ ID NO: 64 - DNA, 1128 bp, Homo sapiens
  CDS (69)..(518)
agtccgagtggagagagcgagctgagtggttgtgtggtcgcgtctcggaaaccggtagcgcttgcagcatggctgaccaactgactgaagagcagattgcagaattcaaagaagctttttcactatttgacaaagatggtgatggaactataacaacaaaggaattgggaactgtaatgagatctcttgggcagaatcccacagaagcagagttacaggacatgattaatgaagtagatgctgatggtaatggcacaattgacttccctgaatttctgacaatgatggcaagaaaaatgaaagacacagacagtgaagaagaaattagagaagcattccgtgtgtttgataaggatggcaatggctatattagtgctgcagaacttcgccatgtgatgacaaaccttggagagaagttaacagatgaagaagttgatgaaatgatcagggaagcagatattgatggtgatggtcaagtaaactatgaagagtttgtacaaatgatgacagcaaagtgaagaccttgtacagaatgtgttaaatttcttgtacaaaattgtttatttgccttttctttgtttgtaacttatctgtaaaaggtttctccctactgtcaaaaaaatatgcatgtatagtaattaggacttcattcctccatgttttcttcccttatcttactgtcattgtcctaaaaccttattttagaaaattgatcaagtaacatgttgcatgtggcttactctggatatatctaagcccttctgcacatctaaacttagatggagttggtcaaatgagggaacatctgggttatgccttttttaaagtagttttctttaggaactgtcagcatgttgttgttgaagtgtggagttgtaactctgcgtggactatggacagtcaacaatatgtacttaaaagttgcactattgcaaaacgggtgtattatccaggtactcgtacactatttttttgtactgctggtcctgtaccagaaacattttcttttattgttacttgctttttaaactttgtttagccacttaaaatctgcttatggcacaatttgcctcaaaatccattccaagttgtatatttgttttccaataaaaaaattacaatttaccc

SEQ ID NO: 65 - protein, 149 aa, Homo sapiens [sequence omitted]

SEQ ID NO: 66 - DNA, 140152 bp, Homo sapiens
gatctctgctcactgcatcctccgcttcctgggttcaagcaactctcctgcctcagcctcctgagtagctgggactgcaggagcatgccaccagcacgcctggctaattttttatatttttagtagagacgtggcttcacagtgttagccaggatggtctcgatctcctgaccttgtgatccgcccaccttggcctcccagggtgctgggattacaggcgtgagccactgcgccaggaccccaaggtgctgggattacaggcgtgagccactgcgcctggcccccaagatgcttttacatttccactggacccttgcgggaggcgttggctgggccgccctccaggacactttgttccctctgctcagggcattctcaaggcctcagcgacactcgggccagccttcccttccccaggacacctgcccgttcccatccctggatgtcccaggccccaggaacccctgtgccagccatcctggcagcccacctgcccacctgacaccctccccacaccagcctgggatccacggaaaggcgcggatgtgtcacccttgggagccaaggctgcactgacaccagggcctgttgtgacctcagtttaagggcagcaaagctgtgagccaggtgaggcttcttggccagctggaggctctcctgggacacggtggggagttattggggagggcccagcatccccttgaaatagagtgttgggacctgaagcaagagtcaaggataccggccgtcctggctgatggccctgaggctggtctgagtgctgccctgaggggctggatgatccctgcagcctcctcccctctcggggcctccgttaggagagggccaggaaggtccttccagcctcggcatccgtgtctgcctgtggacagaggcaggcctcgcccctggcccgccttccttgtaaccttgaccccacgagagacgctgggtcggggcgttggtggatggtgccctgccctgcatcgccccagggcgttggtgccctgccctgcatcaccagcagcagcactctccttgattaagcagcaaggcaaggtgggtgctgactcggagtcactcacagaccggaaggcgaattgcagagccgcaccctgtaatttagtcaaaatgaaaagggcaggaaggaaaggtcaatactgttttaaattagtctaactgctcctttatgtagaggacactgttgctccaaaggactggcgatttagcagttggggagaaaaggtcaagcttcttggtcctagggcaggtgataaaagccagttaaatttttggaaatcatacctgcaggttgtcaattctggcaaattctgtacaaattagtctactcaaaggcttgaagagaaggcgttgcaaacctcactggcaagccaggtggactggggtgggatcacccatacaggcatggggaggggaaggcctggggctggggtgggggagacggtcaggccctggcccgctccatccagtttcctgcagaccggatcccaggccctcctcacagagcaccccacagaagggctgccccgcagggaggcgctgcagagggcaccccaggtgtccccttgcacttggggtgtgcaaatctgatccttgtctgcatgagcggacagagacggtgccggaacgaccctgttcaatgtgtagcaccaactcccggccacccacaccagacaccctcacccccagtctggggtttctggagaaggggaccaggggcggctcccttctccccgcaggcttgcagggctgctcctgacctgtgctgcagctcctggctcctgtggggcccaggttcccggggctgcgtgggagacacagaagtgggggcacctctgcagcacccacatcctgccgacgccatgcacgtgagtgtgcatgtggggtgggggtgcgccaggaaggcaaaaatcccaaatgtcagcgcccggtgatttgaggagttcagacaaagccttccctggggctgtcctcggcccacttccccatcatcccaatgtccctgcagcccttgaaatggctcggatgtggggcaggagggctgggcggatgctgatctgaggccgaggttgatggattccggctcccccagtgccgatccggctgctgccccacgtggggctttgaggctgcggcaacagagccggtgggacacgctcctgatgccagacccaggggtaagagctgcccctgctccacggtctgcgccacgatggctgccagagcgaaaatgggagggagagaagcgctgtcagggcctcccagggagggtgtgtggcgtgtggcttgctaagcaccctcttttctgatcccgccctgagcagctccctgggacttttgttggtcaaagcttcagctgtggtcagaggatccaacgctgccgtcaacaggcagctgctgccgtatggctgcagatgtggtttctggaacagacgggcccagccctgcaaggtgggctggctctttggctctcgagagcaccatggcacagtgctgatctgggtccacacggcccagccacccggtcagctcgcctggttcttacatttccactccacaaacagaacccagacccagatctgcttcctccgcctcccgccctcctcgccccgcaccgtttcttgtcccacagaagctgtcatgggtgctgtgtaccccacagggcgggagagaaaggtgtgtccaggagcaatctcgggaaacagggggcagaggatgcggtgcagagccgagctccggagccaccttcctgaccgccagagcctgactgcatccgtatggcatgaggtcggtatctaggaggccatactctttacctaacatccaggacacaggaaaaggacggaaacagaaaaaaatacataaataaattcaagatgcattttaaagaacatgaaaaactttaaaaggacgggtaattgtctaacattttgttaattcaatcaggcttgcaatttaaaaatagctttgccttttactgaaaaagaaattaattataatttcttactgaatccagggagagaattcgggactagggggttccctgagaaggtcttcttacacgttaccctccaatgtcctgtggccaagggagcttcaaccccctctttacgagggttctggtggctggagaactcagagacggctctaaaaaaattgcaagctggccaggcacggtggctcacccccgtattcccagcactttaggaggctgaggcaggcagatcacctgaggtcaggagtttgagaccatcctggccaacacggtgaatccccgtctctactaaaaatacaaaaattagctggacgtggtggcgcacgcctgtaatcccagctactcagggggctgaggcaggagaatcacttgaacttgggaggtggaggtcgcagtgagccaagatggtgccattgcaccccagcctgggcgacagagcaagacttcatctcaaaaaaataaaaaaatgtaaacatcgcaagctgcacccaggtgtgaatctggagggcgcctccttggaaaacttggctggtgaccgcaccctcagttcaagctcaccggccgcccttccctgtgcacacacgtgagctctccagtatgtttggaatatcccagagccgctgtctcctggctgcccggcctctgtgagccgcactccagcctgaaggccaagacggctgctctggagaaagaacttcccctggtgctgaagtcccgaaggagagccccatgggcatggggaggggagggtgcctcgcccccaaggctgcgctgctccgcggcctggccgggaccaccacacagaggcttctctaggaaacaagccacactcagtgtggcagcagtgaagtgcttttctcagcttcctgctttcctccagagagtaaaccagtgcctgaccgtccggttctccctgaatcaacactcaccgaaaggagctggtggaggggcccgtgggcgacaaacagccacaaaccagaccccggggtctccggagctgggggctctgggtggcccaggggtcgttaatgggcacggtttccagtccagtccaggccagctgtggtggggctcagacccgtccagacactgggagccagtcacccccagaataacgagctgggcctcgagttccaagtcatctttgagcagccgtgtgtcagcaccgctgtccctgaccaccccgtgccggtctgcctccgtctcctccttctcgctgtaccccaggtcgggagctaaagggcaattcagagcctgctgcctgcaggcaaaacgtctccccagcaccgcaagtctgcgcaatttgaggcccagaaaccccctggacgtagcttctgcttttcaaaaactgttcattcgtttagccccaggggacctcatccctgtatgtccacactgggcatcccaaggaagctgggggggaaccgcacctgcatccctccaactcagaaacccccttctgcaccggcagctccgggcccgcactaagtgtgcagcgtggccatcctgcggctgagacacagggtgtccggcagcgtttggatggattctacaatatttgggacagacttacactaaaaaatcagtcactgcttctccaaacttcctgttgagctgggcaccctgtgtttttgtttgctgcgtttttgtttgttgtatctgggtaccctaagaatgatcccaaattacaaagtcaggccctgcagactcatgggaggcagaatgggggcccctaaacatgcccacctcccggtgcacggaaactgtggacacatgaggctgccagtcagccgcctgacacggaggggtgaccctggattatccggggggacccagtagaatctcgggcccttcaacatagaggcggagggcagagcaggtctcagtgacgagacaccactggctctgaagacggaggatgggactgagggccgaggggttctcccctggagcctctagaaggaaccagccctcccaagacctgatgttagcccagggagaccatttcagacgtctaacctgcagaaatggaaagtgtaagtgttcttttttaaaaaattgtcatgagtacatacagggtgttgctatttatggggtccatgagatattttgatacaggcatccaatgtgtaataatcacaacaggggaaacggggtgaagccgctatgtttgtgataattttttagagcagccataaaaatatatgtaaataggacctagttagataacatatatttttggcttctgctctgtagaaactcacacatgatttggggagttgtgaaggcctgatttgattttgtttgtttgtttgcttgcttgcttgcttttgagcctggtgtgccgggcgggcaggtgtttcattgaacctggccccttgcttgttcaagtgttgagtgagggcagtctccaggttccgggagcttccgagtgagcctcacgcctcacggctgcaggtcagaaagtgatttgtggcccagagacccccggacgtagcttctgcttttcagaatctgttcattcatttagccccaggggacctcatccctgaatgtccacaccgggcatcagacctggttgcagagtgggtggttccaggaggcagcagtgtagaccagtgaaggagcagccagggcctgagtgaagctggggcagcagaagcagctttcgatattttttttctgctgagtcttgccagcttttagtttagaagttccttcctggggaagaaagtggccgcttaaatggcataaaaaataatgcaccaggcaggggacccttgagaccctggggctgggctctggctgggggcctcacacggaggaggagggatgagactctcaaggaggccaaggtcccaggtcctgggctatcggaggctccttggggcctctgccttccccaggagcaagcaaggaaggaatgtacagcagcagggcgtgggcacagggcagccccaggaacaatggggatagtcacgtggccccagcctccacctcgctggcactcctcttgtcccaggacaagcccagcctgctgcccgctgcctgcttctcctgcattggagggctccaggcccagaatagctgctcggagccagcatttgcatccacgtctcctccacacgttagaaaacctggactttgttttgtaactgctggttccgctcagcaaatagaattgtacctaactgtggaggggccctacacagtggcccggcccgggagacccacgagggcctcaggagcatggcttctcccgtctgcctcctggtttctgtctctgaccatgtatctccaagccagtcagtcctgagtggccacagtggggatggggctgcaccaggggcctgccctgctgtgctggcctctgccagggctgggccctgcctgtgaaggagccctgggttgggctcttttgtgcccactctcaggtggggttgcgggaggcctgcttggccccatggggatcagtgtgatgagcatgactggaggatgtgcgggcttaggatgagcagagggaccctacagagccacgaccccaggcccagggcccctgttggccccaaagcgagtgtggtggccgtcgttgggaccccaacagggggtggcactggcgtgaggtctgacacttgccaaattcctgcgagctgacccctcgatggggcttgcactctaattctgccccagggaagcccaaggtcaggattagcatcccccctgcttaagggacagctgaggccagggtggggctggggtggaatggcgggctgcatgcaggaagcccatggagcccagatctgctccaggtcacaaccctgtacctggcttggggtccacactccccagacacagatggtggcatgttcccctcggactgtccacctgttgttcggccaagccctgaccctcacagcaggctgctgagttcaaggatgcccctgggcagccaggctgggacccttgcccactccctggacgcacatccgcccgccgctgggttcacaggggagggattagaaacctctcaacggaacgtcgacgaggcgagtggggtggggatgggggtgggaaggggacaggccctcccccacacgtggggagatgcatggctgtgaggtgctgcctccgcctctgaggctggcgataggctggattcagacacagctcgagccgctcaccctccacgtcctgcttaggaggagtgcggggccggctaaatccccaatgcccagggcccaggggcatcccatccatagcctcaaggtccctggcttcccctggggatggggctgtcgcacctgtgtcctcccagttccgaggtaccattgatacacacacaggggtccctgggggagtttcctaactcctcttcctctgaaggccaggcctgggagaatgaattctccaagcacccaccctcactgtaccacggcaggttagagaatgcggacagagctgcttggctgcacaccttgggggggcgtcaccctctttttagcctcagtttccccatctgtgcagtgggtaccagagaggactttacacagaggctgtgcattcccttttttttaattttttttttttgagtcagagtctcgctctgtcgcccaagttggagtgcagtggcgcgatctcggctcactacaacctccgcctcctgggttccagcgattctcctgcctcagcctcctgagtagctgggattacaggcgcacatcaccatgcccggctaattttttgtatttttagtagagacagggtttccccatgttggccaggctggtctcgaactcctgacttcatgatccacctgccttggcctcccagagtgctgggattacaggcatgagcgaccgtgccctgactgaggctgtgcattccctaacagagggggacgtctggctgcccccacaaaacagcagctctgagcatgtctaaggtcagcccctccctgctttccttttctccctgatcaaattcatgtggcttccactcagccccttcttccggctcttacttaggaatgcagatctaccccaaaccccaacacacactggaaccctcaaggtcccatcctactgaaagccaggtagccggtgcagtgagcaatggacagatggatggatgatggatggtggatggatgatgggtagatggaggaatgcatgatggatgaatgaatgaatagattaatggatgaattgagtagatagatgaattgatggatggatgatggatggataaatgaatggatgatggatgaatagattaatagatgaatgaatgagtggatggatggatagatgggtgaatgcatggatggatcatggatgatggatggatgacagatgcatggaaggatagatgaatgaaagaatgggtgaatggattaatagatgaatgaatgagtgggtggatggatagatgggtgaatgcatggatggaacatggatgatggatggatgacagatgcatggaaggatagatgaatgaaagaatgggtgaatggattaatagatgaatgaatgagtgggtggatggatagatgggtgaatgcatggatggatcatggatgatggatggatgacagatgcatggaaggatagatgaatgaatgaatgggtgaatgaattaatggatggatgaatggatgacaggctctccatgagccgctctgctctcctccatggcctcctgctcactggcccctatatctcacatcctacttccagtttaatggagacaagagtgtcctccccaacccaagttctcacccccatcccttcctccctcagacccacctggaagagctgcttctcttctcttgtagaagtctcccatcccaaggaggtgcctggtctttcccctcaggaaggcacctggtccttcttcctcccttccctcctgggagacatctggcccttcacctccccctgccccttcacctcctatcaaggcagctccctcagtattttctgcagaccttgtttgtctcctgtgacgttcataccctcccgttcccacagacattcttccatgtccagcccagacagaaggaggtccccccctgccggatggatgattgaggctgcctgtgtgtacacgtatgactgagcaatggacggaggtgtctgtgtgcagcaggcatgtggcacgacctcggaagagggaacaagacaagatgtcccccaaggtgcccatgaggaccctccctgggcagctggactccagcccaccttgggctgcagtgtgcattgggggtggggccaaagacccctccacatagagaaggcagccaaagggaggagggagtggtcagaaaaggttgtctcagccagggagcggctccaccctctcctgaggacgcctgacctcagacgtcagctcccgttagagacccccgtataccccctgcctagagccaaactctgagagtctctggatggactgaggggtgggacaaggaaaaaaaggaaggagggagggagagaagcagcaaggaggggtcgcctggcccggctcccccagtgaggaaaggggctgtggcacagagattccatctgcagggctgggggcagccgagaatggcacctccaacgcccacggcaggggcccacccgcctgcctcctccgggaccaccgggcctggctcctctcacagactctttgagagcgtatttgtgaaacgtagcatattgtgggtgattagatttaaatttcaatacactttgttaaaaatagagttggctctcgccaagaggaggccgcaggaaggggctctcaacggctcgtctttggaatattaatagtatggaaatgttattagaataatttttcatcatgaataataaattaatggaataattcggcagcgccacgtgacataccctgctaagaggggctttgttttaacagaatggggagggtgggtttggggtgtgggggagggcagagctgggggagggtccgcccagggcaggcggggttgggtggaagtgagtgaggtgcctgaagagatgaaggctccggaggcatttggggaggaggacagagacctgggaccaagtcctcaggcacttttagcttcatgtctcagccagggttctggccctggccggctccttcccacagaaaagctgggaagagatcttggtaggtgtccggccccacacaccatcctgctgggggtggctgggttggacttcaccatccccacagccctgcagcctcccctcctgcatctttctccttggtaaatgccaggaacctcaaaagcacccagaggcccagagaaattgagcacacaggggtggggaattcaagagcaggagctgtttctagggccccaggggcagggccagggtctcctggtcatttctgtgctcgggacccctgctgcacctgagctcactgtggaaactgcctgagggggccacacggagctgatggggacaagcatgcagggtgggcacccttgtgggctcagcttggtccagggtgtccactgggggacggggagggagatggagcaccagggaagaagcgtctcttcatgtggtcagcgccccctccttctccccactccctccttttgcctcccttcctgctgctgcctgcacggtgagaacagagatgagatggcccctgcccgggagcagtcagcggcaccacaaccctcccaggccaacccagctcctgacagagagggagggaggcagcctggggctgggggccctggcagcagtggcacacggagtgtgcacatggatcctagtcagccttttgcagggcgctgaagccagtgggggcccccagggaggttttgggggagtgttgagggggcctgaagggttccgctcctcccacccagggaaccgccatgccactagtgggctgtcctggagactcggggagaaagcacacaggctgtcgggaaaggtgggtcgcaggcgggcagggcagccctgctgtactgatgggcaggcgctgggtgggtggaaggcaaagccatcaggtcatccccctctctgtccctgcattgggccaaccaggtgtgtcaggaggatatttgaccattcctgagaggcacattctctctctctctctctctctccctctctctctctccctctctctctccctctctccctctctctccctctctctccctctctctccctctccctctctctctccctctccctctctcccccctccctctccctccctctccccctctccctctccctctctccccctccctctctctccctctctctccctctctctccccctctctctccctcctctctctgtcacacacatttgcacatcctgcagtgtgaatggagtatgaatgtgtgtggtaggcgacagctgtgtgtgtacgtccgggtgcgtgtgtgcgtgtgtacatgtgagcgtgtgtgcacgtgagttagagcctgagtgtcccctgcgtgggttagtgtgtgcgcccgcccggtgccctccgtcttgggagtctgggctgctgctccgcgggctctggagccggcgctccccacgagcccggactctccgccgcgcccgggagctgcgcaatcggctgctaagacgccggcgccaccggctgggccctgttctcccctctcttttctacagtcttacccgcagctgacagggttcgaaagagcatgaaacggaggagacgttacagcaacgtgtcagctgaaatgatgggcgtagacgcacgtcagcggcggaaatggtttctatcaaaatgaaagtgtttagagattttcctcaagtttcaaatgaggcgaatcccgttttccgcgatgctgcagcgcgcgggttttaaccgcagggtcacgcggaacgccgcgccgcgcgactgtgcctcggtctctgcgcccggctctccctccggtccgcaagaggaggaaggcccgcggcgtgccgaggtcagcggcgcggagccaccaggcgagacggtcacggacgcctgaaccgaggtcaccgaggccacggggccgggaggccctcagcagagcccgggggctccgcacctcaaggccggccaggaagaaacagcagcaggagcccagggcgccccggggagcccccgacacgcgggccgagcgcccagagcggcccaggccctcgcgaggagaccggcctccccagggcggggcttccgactcgggcgcccgtgagccccggaggcggcgcgaaggggcagagtccgcgtttctaaccagcccccgggtgggcggtggcccgcgcggcacggtgggcgcgagcgccgtgggctggggccggcctgggctttcagggcgagggctttccgcgccggccccagcccacccggccccgctgcgcgcccctcacgctgcagcctgggaacctgggccgggagctgcgggccgctccggggaagcgggcctgacctcccctccccaccgccgcccctgcggtgagatcctgcctgccggggcgcaggggcccgcggttgggctccgggagacggaagaggccccacagctcgggccccacgcagtggacgctgccacttaattttggcgtaattgatgtcaaggcgggtgcccgggcccccagtgaaatgcctcatgaactcgctgcgaggaacggcgctccacgcggtgcacggtggccaatcagagctgccgcttctgatggaggctgagccggctggggaggcgtcttggccaagaaccagccccagcctcgctcagggccccaacccgcagaccatgtaattaagctgcgttctgcagccagggcaaggtgcggaggggcctgtttctagcattggggaggaggaagtggggaggagggagcggggaggaaggagtggggaggagggagcggggaggaaggaggagtggggaggagggagcggggaggagggagcggggaggaaggagtggggaggagggagcggggaggaaggaggagtggggaggagggagcggggaggaaggaggaaggagcggggagcagaggagcagagcgggagggaggatcgtcgtgcagggggcctttgtggatgaggctgggatgtccctgcccctccgttccctccagagtctcagctctgaacatcttcccgcacctctgaggagccaggcctggaaaccctctaaaatagatttttctgcctcaagacagaagatgggcgttccaggcagagaagagctgcccagtcacgtgctctgctccacctggtcagagacccttgacctttagaagactggacctgagggcgtggctggtggacctgagggcgtggatggtggacctggccacccagctgtagctttttgggttcctgtggtcccatttcttgggtcaatctcacacctggcagctcccaggaagacacccccaggcccctcacactcctgggggcagctggaattggcttcagggcgggaccaggggccccatgggtgtttggaatccctgatctgggtcaggcaccggcagcaggattccagcctggcctggactctggtgtgtcccgtttgaagaaaccccgccctgtgaaagttcaagtttagcatccaatgacccatttaagaggtttgctgagccacgtcacaggagggtctgggtgcaaacggaggtggcaacacacagagcgagccttgagcacccaggttacccccaggacctccagtctggcttgggggctcctgctgtcctgtggagcagccccctgggatcagggacggggctgagctggagagtgtgcaggattgattaatgatgtctgccacggtcaggccaactgctgtgtttctggggcccacaagctaaaaatggttggaaaaaaatcaaaacattaatatttgtgacatatgagaatgctatgaaagtcaactttgctatccataaataaagttttattgacatagccatgctcactctttctcatattgtccatggctgctcgtgtgtccaggcacataccaggaggctacagacggagctggattctttccggccctttgctggaggcattgctgacccctgctctgaggctccccatggctctcaggatccagaccccaggcttcccaggacattgggggccaatggctccctgagtgccctcctccccagctcttctcccacccctgcccccccaggagccctcaccatgtgccactcactgcccacgcaatctgacctgtgaagggcagacagaggagcaagcctgcctgaaaaggaggactctgactttgccactccgctgccctgcctggccccactgtggtgttaccaggaaaggccatggcagagggacatgcccacgagctgccctgggggagagcggctggggcagggagggcagcactgccctcagaaagccccgcggtggtgcccctacctcccctgggttccaggagtgtggacagaccctgctgggagcagatggcacttctgcagctgaggcctgctggacgctgggccatgccggggacttgagcctggggccacacgctcctcctggccgatgtcaccactcctcttccaacagtcttggccccggggtgggcctgctccccgcccactctctgtgtggacggatcattgctgccgccctctgttcctccctcccaggactcagaagaggggcctggtgtgaacaggaggcaaccgctgacccctggcctgtgcccacgcagaggccacctcccagtctggtctctctgggccagcccctggagtgtgcaaaattgaaaaatagaaattcctgggaagtgctgactctcctgcagtgctcagaggttcgccaggcctgtgcctgtcttggccgggcccacggctctcaatgtggtggccgccatcccgccagccttggccgctcggggactgtgggctgtgtgcctctgatgttgcatgggagctcagatcccccatctgtggactgaggcctctcagcctggtggccgctagacccaaataacacgtggacccggcccggccgggtcagaccccatcgaacacttgggggttcctgtcaatcacaggccctatgccttgcccggtgcctcaacgcccacggggtcagcctgttccacttcctgacaccctcctctgcactgggccagcctggcaaccccacctccgccacaacataaccccggatctgccccacccccaccctcccacagaacgccactgcgctcccgcccaagtcagtgtttcaggaggagcacagcagaaggtgcaggaagccgagtctggccaacaccctccagaaactcattcctgcatccccctgggagacctggactgggacatgggcacagggaggacctctatgctctggggcgtgggggtgggtagagtcaggaggggatgtggcaggaaacatgcccagccgctctccgaatctgcaggaggcacctgccatgcagctcggacctccctgggcttccgggcttggtgaccacaaggctgggctgagggtgggggcagctggcccagtaggggcggcgcaggtgacccagaacaggggctgtgggaggttaagggcttgctggagccaggctccggggctcctggaggaggggagaccacaggaagacctggtcctggagggtcctggccccgtgggcactccgtctttcttcctaaggaacaaccacacctctcctgcagcccgagcttttcttagagaccaaggaggccgaacaagaagcatattttccacataacctttgctttcccatgggaagggacgatggcctgcacttgctggcagttttggaggcatgcccagaagtttgtgtatctgtggatgctgggccaggcatgggcgggaccgtgttgggaggggcctcgttgctggtgtcgagggaatgagctcctcacaggcctctggacagtggccccagggcgcccagccccttcttatcctaatcgagatccctagaggacaccctgtgtcccctgagttctccagggctgaggctatctctgccccatgtctcaagcctcaagaggctcccctctttcttacccgaagaaactgtggttggcaggacaacaacagtcccccaaacgtgtccacgccccaatcccaggaccccgtgaccctgtccccaagtggtacaggaactctgcagatgggactgagttaaagaccccgtgactctgcccccacgtggcacagggaccctgcaggtgggactgagttaaggatcttgagccaggaggtcatccctgtataattctattctatgccataatctctttacatataaaataaacctaattgtatgtaatctgtatttatatattttatttatgttccttcctccttataggagcgaggcaggaagtgaggccatgggagcagaggtcagcgagctgcagtgtgaggatggaggaggggccacaagccaagggatgcgggcggctccagagggtggggtggcaggaagcaggttctctacgggaggctctggaaggagccagccctgcagacagcaagattttagcccagtgagacccgctctgacctccaggacaggaagacgacacgtcgtactgttttaagggctcattttgtggtttgtggaggcagccactggttctgacaccaatcgaccctgattcctccagtgagtccaagagcacagaacagactcccactctggctgaggacacggtgagggaactgtggtgaccccagttccgttcatgtggctgtcactccaggaggatggctctagagcagggaggggccaaagaaggcgaaagcagacaacgggtagcccatgctgggaggggttgcatgtgtggcagccacctctgagcgggggacacctgagctgggacctgtgcggtcatctgggagctgaggactccaaagaccatgtcaggttgaagccatccagcaggagtgacctcagacccagaaggcagcagtgaggctggactggggacagctggagagatggagacacaggggccagcagtgatggggacaggatgctgtgtgagacatccctggtgatgcctggcaaggtttccagcaggggatgggtagggtttgctttgtgctttcagagaagctctccagtggctggaagggtaggggtagcccagcttcagtgccaggtgctggggtcagacaatgcggctccctccactccaggtggggaagggttaccccatggaccctcctcgattctctggcccagaagggtcatgtcaggaggatgggcgtgggagctgcatctccctggagtccctactttcctctttctcagactgatactctccaggggagcagagctgctggtggctcattaattgtgatcaactgtgaaccctgagggaattgttttacttgagggaaggtggggcagagaactgaggagggagggaggcttctggtgagaaccccatttcccagatgacccctgacagcacccctgaccccaggacatggagaccactgcccacaaagggagcctccctgcagctggaggggctgctccctgctccggtcccctcaggttggactgaggctcggcttcaaaagggcccttgggcgggagccaccttccaggcagtcacccccgcccccaatggtgggacccagagggcaagaaatagacacgtctctttccctggattgcagggacctctagccaagcaactccactcatttcagcataattccttattcataatgtgtgagtgaggtggcaagggccataaaatcagccaataatacaaaatcttgtagtcttgttttgcagttctttcccagggctatagcccgaatgtttatgtgtcccccaaattcctatgttgaaattagaacacccaaggcaatggtattcagaggtgcggcctttaggaggggactaggccatgggggtggggccctcctgaatgggattagtgcccttcgaaaaggaaccccagactgacctctcacctcctgcactatgtggggacacacagaggaggcaccatggatgaaccaggaagctggccctcaccagacacaggacctgccggcgccttgatcttgaacttccagccatatatatgtatatcgtctatattcggcaccattcccaccagcaaggcgcaagagttctaactgctctgcagcctcaccaacacgtgttattttccatgacctttattatgaccatcctagtggatttgaagttgtatttctttgtaattttgatctccattttcctaatgactaaagatgttgaacatcttctcacaggcttattggccatttgtatatcttctttggagaaaggtctattcaagtcctttgctcatttatagttgggttgtctgtctttttgttgttgagttataagaattatttaaacattctagacctgagtctcttatcaaatatgtgattgacaaatattttctccaattctatagattgtctttttactttcttgataataccccttgatgcacaaaagtttttaattttgatgaaactgaattttttttcttgtcttgttcgtgcttttggtgtcttatctaagagttcattaccacatccaaggtcataaagatttacctctaacattttactctgagttttatagttttagctcttacattaagatatttgacacattttgagtttatttttgtatattgtgtgaggtaaatgatttttttttgcttgtgaatatatagttgtctcagcaccatttgttgaggagattattctttctctattgaattgtcttggcacatttgttgaaaatcagttggccatagatatataggctttctctgaaatagattctatgctattggtctatatgtctatcttgatgaccgcatcatactattttgactactgtggctttgttctaagttttgaaattagaaaatatcagtcctccatttttttctcctctttcaagattgttttggccacttgaatctccttgaaatttcatataaatttgaggattgggttttcattttctgcaaatgatccttggaattttgatagaggttgcattgagtctgtagatcattacggataatattgccatcttaatattaaggcccccaatccatgaacatgagatatctttccacttcattcctaggtattttattcttttgggtgagattataaatgaaattgcttcctaccttcttttcaggttgttcatggatggtgtatagaaacacaactgatttgtgtgtgctgatcttgcaccctgcaaatttgttgaattcattcatttgctctaaagggttttttttttttttgtaaatattttggagatttctgtatataggataatgtcatctgcaaatagagatttttttttcttttttccccagtttgaatgccttttatttctttttcttgcctcatttttctggctagaacttctagtatgatgttgaatattagtggtgaaagtgggcatccttgccttgttcctggtcttggcggaaagctttcagtctttcaccactggatataatgttagatgtgggttttccataaatgccctttatcattgtattaggccattcttgcattgccataaagaaatgcctgagactgggtaatttataaagaaaaggcgtttaattggctcatggttttgcaggctgtataggaagtgtggtgctggcatctgctcagcttctgaggaggcctcgggaagcttcgaatcacggcagaagatgaaggaggagcaggcaggtcacatgataaaagcaggaacaagagggggtggggagatgccgcacttttaaacaactagatctcacgagaactcactcaccatctcgaggacagcaccaagccatgagagatccaccctcacaactcaaacacctcccaccaggccccaccttcaacactggggatcacagttcaacaggagatttgggcagggatatatattcaaaccagatcaatcgtattgaggaaatgcccttgtattcctagttttccaagtattttgtcatgtaagggtgttggagttttcaaatgctttttctgcctcagttgagatgaccatatggatttctcaactttgttttattaatgtggcctattttggtgcttgagttttatacgtggaatcgtccttgcattcctgggataaatcaaacttagtcaggatgtataatctttctcatatgctcctgggagggtgtggaggctcagttccccactaggccctgctgaccccatcccataagagattgggtcaccacctatttccaccatgcaggggataaatgatccactctctgctcagccggtcgacaccactgagtgaggacatcagagaactgccacctgcctctgcagggtgggggtgaggtggagtggcctctctgaaaccacattggtgtctggctagagtagggatgacaatgcctaaagggggctctgttgtttgaccaccctctcctcatgctttggctgggaggaaagctccaggcttctcctggagagttttactctgtcagtgatgactgcaggttgaaggccactgcagtgtcctgtctatgatgtgtgggaggcaataaggaaacccagggcactcagcaccacgtcatcctgagtctggaggctcccaggcggtggccttctaggctccttggttgtgttatgtgcaggacttttgggttttagtgggaagatccaggaagattgggccgctccattttggtggaaacagaagtctccaattcacccccttttgagtatcctttgaggttttgatgggaacgtgatgacttcagaggcaaatctgaggagtgctggcacctgcatgctgcatgtcttcctacatccacggcacacatgtccacatgaccaggccatcctcagtggccttcacaaagatcacatgtgtccttgatgggcgactcttcatatctttcttccccattgcaaagggaattacttttaattgttctttattatttttatagggatgataatgatttttgtacatgaagcctatactttgctgattagttctcatagtttagctgcatatttctctgagcttctgtgcaattatattctatacgagaaaggactatttgtctctccctcaattcctagtccttgtcttttttgttttgtcttgtgatattggctaggacctctaatacaaactaaatataagtgtgataatgggcctttttgacttgtgcaataatatttccaaagttctattattaaatgttatgatgtttgctgtatttttttttgccttgtatccctagcttgctgagaatttatctgattaacgctgcaatttgtggactgcattttcttgcctctgttgaggtgatcacatggctgttctccttccagtggttcatgtggtttaaaacaaagtgtttctgagattgagccagctttgcattcctcttcatgacatactgttttatatatggatggacttgattttctagtgtttctttagtccttgtcctgttttgatatcaatattatactagacttacacattacttgggtagtttccttacatgaaaaacttttaaagacagatatttactattcctagaaagtttggtgaaacttgcctataaaacctggatccagaggtgtgcgtgtgtgagatagagggagagaggttcagttaccattttgatttgttcagtggtaactgatttgttcacttcttttgtatttttgagtcaattttaccatagtttttgtaaaattatttattttatcagtattttccaatttactaacataaagtgcttggtgtgatttacagtttttaaaatctgtactgtgtctacaaacacacaatattctatttttctctatcctaatttaaaaatctgttcccacctgcatgtgtctcacatgcacacacacagcactgatggaaacagcatgcgtgcagtaagtatgtaatcctggtgactgcacagaccccgtggtggaggagaacagcaggcaaagcagctgttgatccaggagcttttgatgcaaggttcatcttgggatctagacacagacataggtgggaatggtgggttagggctgtgctgtacctggccactctggaccatgccagggagtgctctcacaggtgccccatggccacctctgttgcccccacagcccaaggaaggactctccctgtgccagctttgaccaacactgccttggctgtgaaccaaactggacagaaacagtgtctttgccacaagttcacgcctggtgagggagagaactgagacacgtggagtccctgatgcaaggatggtgcagggcatggacagcaggaaggtaccttgaagggaaggctgggaggggtggggccacagaaggagaggcccgagaggcatttgtggccaagagtaacaagggccccccacttggactttactcacttctcatgggcactccacggcgggtcctcaggccctggaatgtggcctgctgatccattttccagatggagggactgaggctgagggccaggtggggtgtcggatgcactagaattcagacttcaactcctgtcctgttcaacccctcctcttcgggccatgcaaggaaggaggcctcgtctgaattgcccttcccaggggagccaggctcaaggtgacactgtgcctcaggtgctgtgagtccaggcgagttcagctcagtgtaagggcccctagcacggctagaatcaggcagagtgatggggcccaggacgtcctgccagccttgcttcctgaagaactcggacaggccagggctgtaccagagttcctatcagactgggggcttgtgaggagacctcacagactctccgcacaattgcccaaatctctgcctccctctgcatgcaaatggccttcggtgaccttggcaaggccccttccccagaatcactctctttatctcattttgtgcaacccagatgcctgccaccaatgtttcacagatggtttgaaagtaaaattagctgagcacacgggagctcatgcctgtaatcccagaattttgggaggccaaggcaggtggatcacatgaggtcaggagttcgagaccagccaggccaacatggtgaaaccctgtctttaccaaaaatacaaaaattagccaggcatggtggtgtgcacctgtaatcccagctactcaggaggctgaggcacaagaatcgcttgaacccaggagatggatattgcagtgagccaagattgtgccattgcactccagtctgggtgacagagtaaaactctctcaaaaaaaaaaaagaaaaagaaaaagaaaaaagaaaaaaaagaaagtaaaactgctgtttaagagtctattttaaaaaaaaagtaattgcatgcaatgtagatttgggaatttaatgcaatcaatgagttggcaatttcagggtgcacttccacatctatttccaggggaattttaattttcttggtctttcttttatagcaggtaaagcaagatgtcatgatcatctttgagaaatgtttgtttagggcatccagggcctttaagtgggaataatgatacttgggaacataaaattgcttctgaataaacgtctggctcataaggcagcagcactcagagaggccaagagtgcatctttatgaatgagcatggggaacgaaacaggctgagtaaccctgggcccacacactggctgctgccaaaagctccgtcttcagggagccgcgtggggatggccgggtgctggggtttccaggtgcttggattctgctcctgccagggagccaggctgtcaccatgctcagaattgacacctgagacctgcactttggtttgggtcccccagagacacactggagggcaacttgtttgtgtagggggtgatcttaggaaatccggtagggtgtggggaaggaagggagtgtggccgataaaggttgcagcaggatcggctgtggctgcagggatgttcggggagccaggacagcccgtgcgcctcaactttcccgccggaggggcaagggagccgcatgtttttgccctgatacccccagcgcgtcatgggttaaggctgctccaggcctcaggcagaggctctgggcaggtggggttccgctgggctgggtgaggtggcgaggcctgagggaagtggctggagctgacggcacctgctccttagatttaaaccagccgtgacatttccaatattcgtggttttcaaggcactttctcatttgtaaacgtggtcaccaaaagaggacagaggcccctcctttctcagtaaatacttgctgagcttctggggagtgctggcagttggtggccaccagacactcccagatccctgcctcttgcagatgctggtctcttctgtctggcacgcatgacctttgcggtcacactccaggatgtttgtcatggggctctgaggagcggggagtcgacggctctaatgtttgcataagtgtgacttttctgaatgcgttggcagagacgggggtgagaagcaaataatctgttttggttttgtacattctggtaaattctgcaagcgagactcccaaacagctgcctaagagtccagggtaaagctacgggtgacaatgccaggtagcaacgtctcattcagcatcactgacagcaccagatggaaagagcccccgccccttccatacacggatgctcatgcaccacaaacacacacacacacacacacacacacacaccatagaaacgtagacatgcaaatttgcatgcatgcaaacctgcatgtgcacacacagacacacacgtaccacacaccacacacacagatacacacagacgcacactcaccatacatcccacacataggcacacacatacacacacacaccacacatacggacacacacatgtgcacacagtctgtgtctgtggttactgaccaggagggagtgtgtggttgggggcttacggggtagggaaacctggtttggtctccctgctcaaaccagctctgaggcctccttaagactcggttttctcatgtgtcgcatgttggtgaaggctcctgccccaccacctcccaaggaggtgatggaacttcaaacatggtgacagatggagagggcagcctgatggggaggagatgtgatgagtgggtgccgtgagctgcggacggcaccgtgctgcagcccacctaggtgtactttggatgagcagagttgaggcagtcagtaggttggggcagttggtagggaggtacccctctggcacgggaagggctcacttgaggctggatgcatgagacatcctcgccgggacaaggcaaaggccctctccaccccaggtccagccttcacagagctgccagaggtgctgcttagaagcagagtccagaggcagcagccaggggctggccagactggaaactatggaagaggtgggaggaccacagagatcctcttctcaggtgagggctgcctcccccgctcctgctgtctctgattacttgaatcagtgctggacaaaggaccatctcatggaaaagcctcaccaagtacctccaaccaatcttccatcttcggctcaaatgccccctgctcatggagaccttcactccctggcacccacactccctggcacccacactccctggcacccacactccctggcacccacactaggccagtgccccggttttatgccattataaagcaacacatttcctctttgtggctcttaagtcagatgtgaccacacgcccagtccggcaaccgcacgggaggtctctccccctagactgtgctccatggggtggacccaggccttgtgctgtttttacttatatcccccatggagaccagagctaggcacagagtacagcagcaccccaactttcagccggttacccatacatctctcatgtcattaagaacaatgaaactatagcacacacacattccagtggaaaaaaataattttcaaagttccctggagttcgttgcagtggaatccatggcccaggtgagcacagctgcagggagctgcgcggggggagccgcagagctgggcacttgcgaattaagtcccggtgaccggtgactgccgaggctctggcaggcggagggcggggtgcggagatgccgttcagaacctcggacagcgccgcggcccatccggccagccagaagctgggtttcatctgttttcttggggactccaggattacggagtattgccatgataggggccagagtgctttatcccccaaagcaccccccaaaacgcggcacgggtgcaggctccggcctcaacacctgctgccttgccgtgtgatctggggtggagcttcctcacgtctctggggctgtttcccacaggaggaagaggtttagttcagcctggaaggagggcatcccatctgagccgagacctctttgagggtccttgtatgtcacctgctgtctgtcgctggttcgccttctggcatctttgatacctccccagtcagagacctctgtttgtgccaagaagtcatctgctgtgtcttcaaacaagaccgtaggaggcagagcctctggtgctggcacatcgcagaagctaatacctcgtcaccaacggagtgaagagaccacggctttcccctttccttcctgtattccagcttgcatggatgccagcagaattcaatctaaagtggaaagagaaaagtaaacaaacctgagaactttctggatctctgcagagctgggcactttgccagtacaggttttattggagggaagtggtgggttgcttcctcgtgttcccatcgcacaggctggagtaaactagctccgtaagcaggcttgcctttggccgacagatgacaacgtgtctgcatgtagacatagactttacaaagggctagagatggctggtggttctcatggggagatggccctgaggctgatcagtgtcattccagtcaaagggctgcctcttaggggcacgtgacatcccccagcacccgacctgcccggacaaccagccaccaggcagacaggagtgagggggtgaacgaagtatggactgaatccacagcctacctggacaacctcaccacgaagacaggagtgaggaggtgaacgcagtgtggactgaatccacagcctgcctggacaacctcaccacgaagacaggagcgagggggtgaacacagtgtggaccaaatccacagtctgtctggacgaccagccaccacgcagacaggagcgagggggttaacgcagtgtggaccgaatccacagtctgtctggatgaccagccaccacgcagacaggagcgagggggtgaacgcggtgtggaccgaatccacagtctgtctggacgaccagccaccacgcagacaggagcaagggggttaacgcggtgtggaccgctgtcatggctcacagcagcctcaacctcctgggctccagtgatcctcctgcctcagcctcccaaagcactgagacgaacatagacgcaggcacacatgcacacaggctgtgaaatgtatgtctccaagtggctgcgggcccctgaagggctgctgcagccctggggctttgctcttcagagccatgtcgagggagcagtagcgggagccacatgtgacccccagatccagacagagaccacttccagcccccaggaggcccacactcccctccactccacagcgcccccaaaggtgcccacgtctctgacccccaccctgggtgagtaggagcacgtagcaggtgcccctcacgtgcagctctctcatccacacatactcacacatgctcacacaggaaagcacatgcccgctgtgtcctgctgcattgctgggcagtgtccactgcacgtcgctcgctgcattgctgggcagtgtccgcggcatgtcgctctctgcattgctgggcagtgtctactgcacgccgcttgctgcattgctgggcagtgtctactgcacgccgctcgctgcattgctggggagtgtccgctgcatgtcgctcgctgcattgctgggcagtgtccgctgcacgccgctcgttgcattgctgggcagtgtctactgcacggtggacgctcctgcactcatggatgctcaggctgcttcccgttggacgcgattgtgagtgacgctgctgtgagcctccaggtaccggccttggagccagcaaatgctttcatttctcccatgcaacatctggggctggaatttctgggtcatatggtgggtgtatatttgactgtactagaaagtgtcaagcggttctgaagtggccgcaccatgcacagccccagacagtgtgagcgtccgctgcctgcagccccccagcactgcccagccagtctttccggtttgggccattctggtgggggtgaggcagcactgcacagggtcttatttccatttcccgaagcccatatgttttctctctggaggacgggggactcaaggcaccctccccgccccctcctgccttctccataaatctctccctctgaaaaacacaatcaataagccacagagcccaacatgcgaccgcaaagccgctccattattaagtctgtaattgctgagaattaatttgctaattgcacgcaactaatctgcgtcctttctgttttatatcaattaacagagtaattaaaaaaagcaatcttcgtgtcagctcctccctggcagacttagcctgccagagctaatgagacaggccacccttcagccaacctcattagtgacgaccgtgcggccaggaagtccttgatgtgcgatgtgcagtagctaacaagggcccccctgccgcgaagcaacaacttgctgggcatggagcagggacccacgggtccccatcattgcctccgggctggtgggacccacaactgtgccaacacaggggctttgctgggctggcaagtgcagggggccccagccaggcagtttcagaagagcaggcacgacgccaaggcctaggaaggaggccacagaggcccgagtatcccagggggtctttgctgggatctggcattgggtgcctctcccgctacgcagggatggagagaaaagacaccgagagtcctggggctgatgaagagcttgagctcggagcctgaccacccacagacagcagagtgatagacgcctccatgacacagaacgcagccctccctgcctccagcccacaaagcctcctcctccacagcccgacaagggccagtgctgggccagctgctggaggacagacagccacgccaggggacaccacagctcccagctccctcctgcgcctccccggccaccatgaggatggaagacagcaccaaggacgaagaagagagcctgagcagaggccaggacctgggccaactcagggaccaggcaagcacaccttgccatcttgcctgtcccctctgctgagcaggactattgctgggactggccccctccacagcacccaagccagccttgggcaaaaggtgctgtcatcccagctgacccctggtgccagcccggtacacaccagtgaggggatcaccagggaggcctggtgccagcctggtgtgcgccagtgaggggattgccagggaggcctccacacagactgacctcttttggtgctgggggaggggctgccactgtagatgctctcagctggggaaccttccccagagcaagctgctggatgtgcaggggccccgggcatgctgtccagcaggtcctcccaggctcccagctgcccccatccatggccttccgacacagccgccagccgctgaccgacatcaggtgcctgtgcattgctgggcccaccctccagcactgtcacgttcatcttagcaatggctcatgaggttggatggctcctgtccatgctcagccaaggatccactcagagcagttcagtggccttcccctggctgcagagtagagccggatggagttggacctggacgcaggccgcccccagcctgtgctcctggccaccgctcagcctgcccctgctgccaacacggtccgaatgaccactgtgtgtcccatgcgcctccacgggcccagaggcttgtgtgtgccaggctcagcacctcaggaccctcggtctgatcgctcgatgcccaggaagcccaggaagtgcctgtgtccccctcatcccctgcacagtcaccccaacacgagtccctgcaccccccttcctgacctccctcaccctgcacctttctcctgtaccctccaggtcctggcccctcccctcccccagaatgagcccttcaatttctcacccaacgaaagcctggccctgccctgaggcccccgtcaaggggcaggggcaggggctgctcccaccctcctgtcaaggcgactccattcctgggccattctccatcctcctccccaaagtcctcgcctcccgggcccaggctctgccacctgcctggctcagcctccagcccagccccccgccttccatctccccttgcccaccagagggtggggccccagacatgggctcttgtccctctggcctgcctggcccccccacatgcacacagggtgaggcggggcagggaagctgggccttgggtatccagccctggggaagagccaggccagggtgaggctgagggtgctcagctgccaggtgctcaggaaagcagggagcaggaaactcctggaattgggaattaagtgcaaggagaggggatgtgtggagctggcagcattctgccaagtgctcccccagagagccagctgcactggagcccacacgcacagagcccggggcgtggcactcatacacacgctcgtgtctgccttcacgtgtgtatatgagtgtggagtgtgcacacgcatgcttgtgtgtgcttgagcacatttgagtgtgcacctgtggctgcggtgcccaggtgcatgtatgtatgctcccgtgcaagcacatatgtgtgtgcattgggaggcaggaaccatgacgactgcacagcccagcacggcgcccccacggtcacccgccctgaaacgaaagggacccccaggtcacccaggctggagggtttccagttgctcccctcagggtcacttaagagtcaggcgagtccacaagacctgctactgcaaaatcacagcctgcagcatctcagggcctgtcttccaccccagcccattgtcattctgcataaaagcagaaaaaaaaaaaaggcaccaaactgcaccaagcgtgcaacagatgcagctcaaacaaactcgtgtacgacacggaagagacaaaagcgttgccggcaacttgtttgggacacacgtgatacagaaaggtgacgaaacatcacagatcagtgggaaaacaactaaactgcaaactgaagaatgggcttgggcagaccactcacagaagaaatcccaaaagccaataaatgacttgaaactatccagtgtcactattaaagaaatgcagatttaaataaagtttgactttcaaactagcaaaaaatgtatgaaactatgaagctcgatgcgtgtgatcatcagcagaggccgacgctgcaggcagggccaaagcttctgaccctggcccccagggaggaacccagaggccagtcagggaggggcagcgagctcacggccaggcagcgccacagcactggcgaccctcagggagaacaggcactacccagggctggatgcgtaacgggccccccggccacaccccaccgcccatcagagccgcagctcctgagaacgcatccggaggcaaggccaaagtcagccatggcacaaacatttgtgcatcaaggtcctgttgctctgcaacaactcaccacaaacagaggggtggaaacctccatgtcatcggacggcccagcggtcagaagtccaacgccatctccctgggctgatgtctgtgcaagcagggctgatgccgtagcttttccggcttctggaagctgccacagcccctggctcatggcaccatcctcacatcctctgaatccacattctcctctgaatctcccgcctccctctttccactgtaaggaccctgtgatgacactgcaccctcagaccctggtaacccagggtcatctttccacctcagggcgtctgacttaagcctgcctggagggtccctgtggtcacattcatgggttccagggttcagacacggccactttgtgggatcattactctgcctaccacaccatgtggccctgtgtgtgttttcagggggcatttgcgcttatatgcaaataatacatatatgaataaacgtgtgaatggtggtcacgtaggagagggcatctgtatggggccacacctgtatcttcgctgtgctttccacttgttattttctaaagggtggatatgatcttacagaggatagctcaacgtccagttgtggaaggagatgggacgagggttggatttacttggaaacacaatggtgcccacagagcagccaggactgaacttggcctggatctaccctgagcctgctcagtgcagtaggggctggtgctgctgtggctccatggtttcaagttaatttttgatccatttcaagttaatttttgcatatggtgtgaggtaagggtccagcttcattcttttttatgtagatgtgcagttttcccagtgccatttgtttgggactatattttaattaactatttttttttgagacaggaggaccccttgagcccaggaagctgcagtgaaccaaggtcatgccactgcactccagcctgggtgacagccaaacctatctgcataaggtggtccctgagcacagccgtggtttctgcaccatggtggcccttgtccctcagcctgcagtggacacagtggatgttgtccccaagctcctgttgtctggagcctttctagacacccgtgacccatggaccagcccagagacctcaagggtcacggcaacaagcgtattgtgggaagggagggccgagatgacgccggctgcagagactggccagagccagagccagatgctggagagtctcatgggtcccaaggtgcccacagggcagaaaagcccacacgtggtgatgggagggcgacctggaccacacacgtgaactgacgctcagccgcagagtcctggggccatcacggcagccccgcaagggctctcaaggtcctggtttcccaatggtcacaccgaggcagagaaaactgaagcgtggaccactgtggcccgaggccagaccccaacctcgccgggcttggaattaaccccgggtagatggcggcacgggcttagctgaccttttccaacgtctcatcagccccagggctccttgctgttagggtctccaggtttagcaaatgaaaaaacaggtgcccagttaaatttgaattccagaaaaacaagaaattcttttttttgtatgtgtgtgttttgttttgttttttgtttttttgagaaggagcctcactctgtcgcccaggcgggagtgcagtgattccatcttggctcactgcaaccactgcctcctgagttcaagtgattttcctgcttcagcctcccaagtagctgggactataagcgtgcgtcaccacgcccggctaatttttgttttagtagagatggggtttcaccatattggccaggctggtctcaagctcctgacctcaggtgatccacccagcactttggaatcccaggtgtgagccaccgtgcccgacccatgaaattcttttttcatataaccacatctcacacctgcacagggcatccttcatgcaaacctcggggtggggccggcgtcctattctccagcgtctctgccccaagtcgagtggatgagacaggacctcccagctcctcctccctcccaggtatgtttagcttgtcattccacacttacttgtggcaggtggctgtcctcagcccaaggtcacgtcatgaatattctggtttgggcgtgggagcctggggatgaatcacaggccagattagcagcccctcaaccctctcgcaccaaatcaagggccagcaggcctacgtcaacgtaataaacgtaaaccccttctctgccaaaaaagaaggctggatgagtcctccctgagtcacccagaacatctactagtcacagccagttattaactcccttcccgggagccaccgctgcaggaacatggcagcagggcagacatggatggggctggggccttggtccccctcccggctcaggccactgcacagccgtcctgccccaaggccctctctacatgcttgatgggcgccaccgggcactggggggcaggaggcagaggagggaatggaggtgagccacacaggggggccggactccagagcccaaggaagctcgcctctggaggctttgttacccacatgttcctgaggggccctgccaggaggaccgtcccctgaagggagaggaggcctcagacaggccggggatgcccaacacagctgtggagccatggaaattacacaactcagtaaatcagaacaaaacccaaggagagagacgagcaaaagtgagaaaggccaggggagaggccagcggcggccactgagggctgtcaggatgaacgcaggccacaggctgcagtgtggagaatggagagaggccagggaggtcaccgagagtgaagtatttggggagatagcgggaggcacgtcccaccctggagccatctcgccgggcctctgagagcgaagtgtttggggagacagcaggaggcacgtcccaccccggagctgtctcgcctccttcaggactgtgggtgtctgattctccacggctctttaaacaaactgaacctagaaatggcaccagcaccaacagacttggctatgtttcgtgcagtaaagagcgggcaggtgggccttggcatggggctcccagcaggagggaggcagcaccccctctgcccttctgctctgctggacagggagtgggcaggctccgtctgcatctggtcctcctcacaccctgggagctggttctgtgatcatctcctccttgcaggcaggaagtggggctcagggaagccaaattatctaagaccacatggttgtgggggccgggctggggccgaggtgatgggtctggtgggctctgctcctgggactgtctctctcagcctggccctcagagctcccctgaggccttgtctcggtccagggacagccagaggtggccaagaagaagggttccctccactccatcagcctcgtaaaaagagcctcagatgactgtctctgtgtttatagatgcgttgccccaggatgagagatgcaattctctgaaaggaagcaaatgcgatcattatcctcttcacccaggcctctttgctggtgggaggttagttttgcgtttaatgaacatgggctgagtctctctaatgaggaagagatgggtgcacagtgattagaaacttggcagagaaagaagccatcacagcttctgtggggaggagccgctgggtttgccgtatctgcagactggcaggagggctcacagcaggcaggctgcacactgatctctgagacccccgcaagcctgaatcccctcgcctgctgccccaggctctcaggaggacaagtccctgggtttgtgggcgacctttggttgaagctggggggcatccacaaaaataaagcaggtcagaaaccgtcctgagggctcccgcagcctcagcaacccaggactcttccgccccacgggactcttgtcccacagacaggtgaggcagatgcaggtagccacccacccaagcaccctcagccagcagagacgcaggaaaatgtttctgctccacatactccgttgaaatgggccccactgggagagaacttgcacttgacctgggaaccacagagcctggaattggcagtgagcttggtggtgcacggtgctgtgaacgggggcctggcagcagcaggtagggctggcgcattcctgccaaccctccggggggaaaaggcccaggaacaatggaatatgactcagcactaaaaaggaacgactttcgagccacaggaaggcgtggagaaacacatgcatgtcactaagcgacagaagccagtgtggaaaggctgaggggaatgtatgagtccagctataggacattctagaaaaggtgaatccctggagacagtggagagaccaggagtggccgaggttgggggagcagataatttttagggcagtgaaactgttctgtatgatacagcaatggtggatacctgaccttacacattgtccaaagccacagaatgcacaaggccaagcgtgcgctcaggtgcactctggactttggtgaatagagatgtctcccctgtgacaacgtcccacaccaacacaagaggccaatcacgggggaagccgtgtgcaggggagtggggaacaggaaactctctgtgctttctgcttaatttatgtgtaaacctaaagccacaccaaaaaatcaagcctattcgtttttcaaaggtgtaggcgacaaagcataaatgaagaaactctgtcaggcagaatgctcatgccaggtgccctcccgatggagctgggcatctgtgcagtggtgacagagacctgcccctgagaatggagctggagggtccacgggtcagtgtcctcacctgcctgccagtgggcccgcggatcagtctcctcacctgcctgccagtggcactcatctctgaacataaccataaaaatcacattccccaaggcaaacagcaaagcctcggccccatacgctaccgtttcccctgaaaaatattttgtcaagtgaaacatttgagaaattagcaaattttccacttccaagatcttgctgcaaagtgatgatgcttcattctgcccagagagctccacaatcacctccctctgaaagcccccctccttggagcctcctggctcccacacagaggcaccgtgtgccagggactgggccccatccggaggcagcttggactccacgtttgctcattctgccaaaaagaattcgtggcaaataacgttcacacaagcacagccagcggtgggcagaggtgggtgcctgttggcttgttttaattttttaccatttttatcatggaatatcatatcacaggagaaagtgcaaaagtgcgtgtgtctaagtgactatgaatcagaggccaaatgttgtcagccctctaggggccctctgcgtccctccctccagagaggaacgccatccatgtctttcctatcattgttcctgactttatttttttcctcagttttttaattgtgataaaatatacgtaacataacgtatatgaccattcatagctgaccattcttgccactcataagcacccagttcaggagcatcaaggacattcccatggctgtgcagccgtcgccaccatccatttccagaacttttccaccttcccaaactacagctctgtccccattcaacaccgactccccatcccctcccctcaagcccgggagacgcctgtctatcttctctgtgaatttgatgactctcgtgtttcttatcattggaattccagttccagtggaatatgcattccattggtacttgtccttttgtgacgctcatttcatttagcataacgtcctcgagcttcatccgtgctgtcaagggcgacaggctccccttcctctttaaggctgaatcattttccgctggatggacggacacattcgcttctccgtccatctgtcgacggacacgcaggtggcctccaccctctagcccctgtgaacacaggtgtgccagtattttttcatgttcctgcttccaattctctggagattgacccaaaaggggggtttctggatctctgctttcttttacctctttatatgcctcctagataccatagtctgcagctttgcctgttcgtgaactctctgtaaaaggactattctcagtgtgttcttctgatttgctgctttcctgccatctcagttctaaactccgtcctcactgcacgtgtgactcttgtccacgcacgtttgtggctgtgtcgcgttcccggcgtggccacgccgccacgtattgatctgcccgctgcagacacctggcctattttccaggactctgcaggcaggggcacccttcgccagagtgtgtgcagggcctttctgtagtgccctcccccagaagcacatgggcccgtcggcccccgcgtcctcggacacgcaatgctgtcggtcgttctaaccgggctgtcctgacgggcgcgcagcggcatcccacggcagtgttcacgagtgttgccccgtgtgtggggaggcgcctgttcagctgtgccacccgtttttctaaggagtcctctttttcttgctgattcagagtccttcatattctggttttgagttcctgtgagttttatgaatgaccgcaccttcaccctctcccgtgtcttctgagaaacaaagtcatgtgtgctgatgttacccgcttccgctgcagcaaaggctcttgggggccttgtctgtgaggtcatcaggatggggctctgggtcaaaagtgctgccctctgggcatccacctggggggatctgaatgccgtgggagtctactttccttttttcccacgtgggcacctgactttcctggcaccagaacaagagtccaaccttcccccaataacctgcaacgccactcccttcatcacacatccgcgtgcgtgggcacgagcacaggcccccctcggtgcccaggcggtgtcctacctcgtgggtcagcggccaagccccccgccagcagctcctcgtgctctgggcaactgcggccccataacacgtcccacttgccatccgctgttgcaccgtccacctgctcctcaggagggtctgggctgctcccagcctttctgtacttctctgtacattttagaattggcttctaaaatcaatctctctctctcactctcccccactggactttgctggcactgatgtgcatctacagacagacccagggaaaatggtcaccttcctaacagcaatctttccaatccatggaagggatgtctcaggtcttcttcagtgtctccagatttgtgggtttgccataaatgtgtcacatttctttgctgtttactctggtgtggttcatagtttgatgttattagaaatgacgtttcctacatttattttctccctttttgtggttaatgccctgattttcttacactgtctttaacctagaagcgtcaactctctcgccaatgcccacagtgcaggtcactggggacccctgagcacagccaccatcccccgggacagcgttattccccatccccacccccgggcccccactttctcgccctccctaaccctgccctgctcctggggtgtggggtgcaccctcgttgcctcccatcatgtgaagcctccttcgtcttccaggtgcactgtgaggctttctaaatgtcctaagtggaagtctaatttatggagctcttttctgcacccatgaagagaatgagactttccccctccaggtgctgctgtggtgtcaccgtgatgggttctatcccctcaaggtcctgctgccatcggggccacacctgaccatttgctcccgacttggggcagattccttggggctggagtgcaggagcctcaccgccaggggctgccacccccaccccggagggctcactctagggctctgggtctcaatccccagagaagggtgcgtgggactcctcctcactcacccactcacctttccaaccaaagccgtggacaggctcagatcactgtccacacccaacaccgcgcttcccgtgtactctgcccgtgtggtcagcaggggccgctccctcccctcccccactcgccctcctcccctcctctcctccccccgccccctcatcacccacccgcccgccaccacacaatacggttcctttcattgtcttgtgttaaggctctcgggtgggggggtggttattactgtcccactgtgtgacatcataataggctgctgtcccagaaaacaaaggctttcgaagatggcgaggagacacgtcctatttacgtcgtcactgcctagacagacgtggaagtgcgggagcagaataaacatctgtatccggagagtaacaatagcgctggctgccctgttatttccgaagcctgcctaaattatgccctgcgcagcacagaaagggattttttgtgtatgtgcaggtggattaataaaaaaccattgaaatgcaaagtgagggctcctccctcacaccccctccccgagagaagggaatcgtcacccaagaactcgcagatcctcttggggacacataggccggggtcgaccgtccgcaagcacgagacccagggctgcagggggaggttccggctgctgctgttaccgtcttgacccccaaaagaccaaaaaagggccacgtgcaaatcgtaaaaatcagatgtgaatgaaccacacggctcgcaagggtgggaggttcatgccccagcccaggggtctcccaacacctttaccattggcacccctgttttggaaaaataacacagacgttgttccactacgtgggaaatacaccccgtggctgaactccatggcttcacccgcctccatcgttgggctggcaagtgtggattggatcacaatgcccacctgagaggaggcctgtcgggtccccaagctgcccctgggccgggccacccacacagcaaggggcaggggccgcctgaaagcaccctgtgctccggcgcggcccagatgcatgctctgttcaggtggcgtagagtccttctgcctcggtgtggccccagggtgggtgcagctcagggaggaggcgcagtgagtccttccctccctcggccgagcagggctttctgccgaagaaggtgtttcccgtcagcgatgaagaagtaagttcgatgctgtggaaatggattctctgattaaaaccaaaaagcaaatccagcccacccggccatgtgcagggctgtctcccacataacctggtacttggtggtggacggaggagcggcctcaccagagcacagggtgggtgcagcacttgctgctggagacgctgccccgtgtgacacggggtgcacggaagccccaccgtggaagtcacggctagttcctgccagcagcgagtagcagccagcatttaaagacacgcctgggggttgagcccaatttattgtctttattaaaaaggatattgtagtagcctgttttcacactgctataaagacatacccgagactgggtaatttataaagaaaagagacttaattgactcacagttccacatggctgaggaggcctcaggaaacttacaatcacgatggaagggaaagagacaggtcttacacggtggcaggcgagagagaagagtgtgtgagagtgcagggacaactaccatttataaaaccatcagatctcatgagaattcactcattatcgtgagaacagcatgggagaaactgcccccgtaatccaatcatttcccaccaggtctctcccttaacacctggggattacaattcaagatgagatttgggtggggacacaaagcctaaccatacaggtatcaagtgttccatgctgccctttgttgaaaactgacttttatggccctgccatgtgaccatgggtgacaaatgctattccctcccagcttggggccacggtttctccagcctgtacattaaagcctcatctgttcttcctccccaggcctggagggctcaccggcccgtgagccctgtgacattacttcccctgggcagactcagggcaccatgaagcttcccaccgggtaggcactcactatgtctgttacgccgggcgccggcccgagtcctaaagataggcagccctgagggcagaggcactcactggagctcgtgcacacacgtgcacacacgcaaacagccgggcatgtgcacaggaacacaagcacacatccacacgtaactgtgtgcacacacatacacacatgcacaatccccactgtgcacctgagcatcattgtacacatgggaaatacatccacaaacacacacacccataaccaggcacatgacccggggctgccagtgccagagtgatgccagctgcgtaggccacacctcagtctgacatataccttcctggttcatcagccccatgaggaccccaactccaggatgtacagcagaaaggagtcttcacctgcttcacagattaggacaccgaggctcagagagggttgagtggctgcctgaggtcacacagcaggcaaggcagggaacggcactgctgcccctcattttctgctgaggaaaaggtggacggggtgccagccgcagtgaagcccacaggcccccaggtgccacctatcttcatagcctggcttatcgtcaccccaggaggaggaagggccttaactatggcttccacatcagatgccagcccaccctgggttaagcatctgcatggagcccagcgatggggacgcgatgaccacgggcctcagaagcacccacagcctcgaaggggccaggactggctgcacacagcgccagtgacgacaactgctgctggcggggaccggacgctcaagccccagatacactgtagcacgtccccagagaagctggactcagagctcacacttccctagagacgctcacgtccaaggcaggatgcaggtgtgcagtgcagagccgctcagagcacctgagctggtggaactggccgggggtccagggtccactcaaggacgttctccatgtgcagctgccagtgactcctgggggctgccgggcctgatccagtgagagggtggcctcccccaagactagtgcagtagacaaggccctttcccgtcagccaccggagcgagctcactgagcacaggccatctccagggcggtttcagaccttccggcccctttcagggacagccaggcctttgtgcccaggaccgctgccctccagacagctccctgtcatgttcacgtccagcgctggctctgcagacactgggggccgccttcactcctggggacccccttccctgcctcccgcctctctccaggcacctgtcccttagtacaggagctcacagctcaccatgctgcccagcacccaggctgtaccgcccacagctgtgcaggcactcacagccaagtacggagccttgcggaaattcccccagatcctggcccttcacccacacagatcggaccctcaggggacatcggccaccaataaaggagccagcctagatgtcattgcagctgagcccccatggccagctcctcgggtcacggcagctccatagcaagggctcctctcatcccaatccactggggccactgccaagaggaggacacagccttggccatcgagggggatgctcaggtaccaggacccaggatgcggacagactccagggtctccaaggttcctgctcagaggttggcagggtgcttgtctccagaatgatgcccacctggcgataagtctcagcagagccccctgcagagtggccctggggctgggttcggccccagacgacctgaggaagctgccaggtaacaaagctgtcggcatccccagagcccagcgggcaaagatagccaagaatctaccaccaactggcagccaagattgcctgtgggtcatgcagcaggttcacgtccctgttttaacttttaagaaaccaccttagtaaaggttgtactgataaaccgagcaaagactgggcccgtgcccctgccccagcggactacagcctgaaggaggggccctggaaacccaggagctcctgtgccagctccgggcacttgaccatcgcccaccaggtttgtcccctcggctccttccttccgtgcctcacggtcggccttcgccttgacgtgcatgccaggatgcatgaccactgggcaggcaagtgcacccctgggtgcggcaggaagaaatggccccttgtaaatcccacaggcgaggaggccacactcgtgcgggggtggggcccacagagggaagcagggccatagaggaggcggggccacaggggaggcagggcctgaggggaggaggggcctggatggggaggcggggccccaggggaggcggggccttagaggagacacggcccggagaggtggcagggcccagaaagaaggcagggccacaggggaggcggggcccagaggggaggcagggcccagagaggaggcggggccacaggggaggcggggcccagaggggaggcggggcccagaggggaggcgggtcccggaggggaggcgggtcccggaggggaggcgggtcccggaggggaggcagggccacaggggaggcagggcccagagaggaggcggggccacaggggaggcgggtcccggaggggaggcgggtcccggaggggaggcagggccacaggggaggcagggcctagaggggaggcggggcccagaggggaggcagggccacaggggaggcggggcccggaggggtggcagggcccagagagaaggcggggccacaggggaggcggggcccagaggggaggcggggccacaggggaggcggggcccggaggggtggcagggcccagagaggaggcggggccacaggggaggcagggcctgaggggaggaggggcctggatggggaggcggggccccaggggaggcagggccttagaggagacagggcccggagaggtggcagggcccggagaggtggcagggcccagagaggaggcagggcccagaaagaaggcagggccacaggggaggcggggcccagaggggaggcagggcccagagaggaggcggggccacaggggaggcggggcccagaggggaggcggggccacaggggaggcggggcccggaggggtggcagggcccagagaggaggcggggccacaggggaggcggggcccagaggggaggcggggcccagaggggaggcgggtcccggaggggaggcgggtcccggaggggaggcagggccacaggggaggcagggcccagagagaaggcggggccacaggggaggcggggcccagaggggaggcggggcccggaggggtggcagggcccagagaggaggcggggccataggggaggcggggcccagaggggaggcggggcccagagggggcggtagccccgccaagtcttgggggcctctcttgctgccaagcaggaggcctgggctggctgctctgtctctggaatgcgctgttcccaccacttggcaacgcctcagagggcaacacggccctgcccagtggggagagggctccagctgcccaccctctggccctgggtaggggaggatgaaggtggcctggcttccccgtaggaccagatgccaaaaggtaactgtcccctaaagagcagtgagggcctacttgctgatgaaaagcctaatcaagacatttttttgagacggaggctctgtcgcccaggctggagtgcagtggcgtgatctcagctcactgcaacctctgcctcccaggttcaagtgattctcgtgcctcagcctcccgagtagctgggagtatcggagcctgccaccacacccgggtaatttttgtatttttagtagagacaaggtttcaccatgttggccaggttagtctcaaactcctgacctagtgatccactcacctcggcctcccaaagtgctgggattataggcgtgagacaccacgcccgaccctaatcaagactttttaaaaacatgaatcaaaaagacacactttaattaataggcagtgaattaaaagactgctgactttggaaaaatcgttttctgagttcaagatcggtgacgctggattagcctaattgatctgaacttgttggtttgggattcaagggcaagtttggttccttagtggctggctgtgttgtgtccagattgatgttcccaggtggggggcaggagccctggaaacaacagccagaccctgggcagccggccccggcgaagaggggtccaagccctgtctcatgtctcccttggggtacatttgaggcctggacaccccaaccccgggaggtggggagtgggtcaggctggatatgagcaatgacactgagaagactcaggggcctcgccagacactagccccaggaggcccggcggtgtcccaaaaactggccatctgttagacaaaccaaaagaaactcaaaagaggtaaacagtacaaatctcactcgatcaaaattaataaaaatagaaataaaaattccccaatttattttaagttacatgaccaagaaataagtaccccatgcctaggagagtgggtggggtttggccaggctgagctcagggaaaggtacgtggccttgaacttcatattccagatgaatattaagatgaatggaatgaatacagtcgcccaagtcattcaagaaaagtaacaaataaagagaagatggggaaaagtcaaagctgatgaattagggagaaaagctacggaatttgagtccaacaactggttctttggaaagttgtaagaagtgagtgttccaatcattttcctggtcaaaacattcggcctcactggtggcctgagaaatcgcttaaatgtcatcagagtagaacagaaatcagggcaggaaagagcatgggcagagagggaggggagccccagggcgtctccggtgcgctcagacacaggttcaatatgtaaaacagtgttattgagctgtcgctcacatggtataccagtcgcccatctacagcacacaactcgatggtctgagtgtgttccttcacagagttgtgcaaccatcaccacggtcaattttagaacattttcatcacctcaaaaagaaaccctgtccccattagcagtcactccccactgcccccaccacacccccaacccctggcaactgcaaatctgtttcctgtctctcctggtttgcctgttacagacatttcccatcagtggaatcacacaatatatgttgttttgtgtctagcttctttcatttaacaaaatgttttcacggctcacccgtgtggtagcatacatctgtgcctcattctttttgatggcggcataatattccattgcacagaggagccacattttgccagcccgttcatcagtagacgggcagtgccttgtttccacttcttgactatcatgaataatgttgctatgaacattcatgggaaggttttatgtgaaggtatgttttcatttctcttgggtacatacctagaattggaattgttagataacatggtaattccatgtttaaccattttgagaaacttccaaactgctttccaaagcagctgcaccatttcatatccccaccagcaatgcatagattctgaacttctctttccacaaacttttgttattaaaaataaattgtttaaagaagggaaaaaacagctctccataataaaacacactgctcttctgaaatctcccttggcgtgtgtctatgagttgatttacagtgtgggtgcaagtccacaagccagcagacacacagggccacagaagggacactgccatgctggcccactaccacgttcacaccgaaggtgactttgcctggctgtggactcagcgaagctgggacaccctcagaggcgactgtccacccaaccctcaccatgcagagacagagaccagcacacttggtctcctccacccagataagctcttggagaggtggccctggcacctgtgaaaatgtaaatggctgtcggcctttgacggtgctgctgacgggtgaccagagttctctcgcggctgcacgttttcccatgagcgccgaggcaggttcaatatggacagctcctccagcccctgcaggtaacccagcccgagctcccacttcctttgtaccaagcagaaacaagggcatggaaaagggaggggtgttttcacatctgaatggcaacattcccgtccaacaccccggactatatcttcaaacagatctgtctgagaagacagtgattgcattgagcccagcgtgctgtcagctgcttgaagccagtttcggcacacgggtattaggttatagaagaaaccttgttgtaaggatcgtcagggaggaagtcactgtatttacttgaagtttgcacagcttcatcagtttcagtggaaataactaaaaatagttaaagacattagttaaaattaaagaaaaggggacgagaaaacaagctacagcctgagagaaaacatttacaaaccacatgcccgacaaaagactcacagaatatattccttaaactctcaaaactcaacagtaaaaacaaacaatcaatccagtgagaaaatgggcagaagagacatttcaccagagaggctgtacacagggaaataaacacaggcaaagacatctaatgtcctctgccagggggaactgcacatttgactcacgatgaaatgtcactacgcacccatcagcatggcggaaataaaaaataacggcaacattaaatgctaacgaggtcatgaagaaacgagatcactcatacactgttggcgggaatctaaaacggggcagccacggtggagacggtgtagcagtgttttgcaaaaccaagcacgtgctcacctacaacccgcaactgcattcctgggcatgcatcccagagaaaggaagactttcattcacacaaaaccctatcacgattactcatagcaactttatttgtaaccacgaagaaccagaaacaaccacatgcccaacaatagatgaatggctatacacgctggggtgctgcacaccctgggactccactcagctgcagagaaagaaccggtgaagcacacaacagctctggcgggtctttggggaaagaccaccgtctaccgccacgcgagggaaagaagccggtctccaaaggtcacaccctgcgtgatttcatttctgtgacattctcaaaatgacgaatttggaggaggttggagtggggaaagagctggaggctgtgactaaaaaggatagcaggaggaagatctttgcagccgcagaggggccctatatcttgactatagtggtcacgcgtgtgataaatggcaaagagcagagacgttgtcggaggcacgtcctggttgcgaggccgtcctctagtggagggatctgggtgaaggatgcatgggctgtctctgtactactgtgtctgtctttgcaacttcctgtacatctacaatcattgcaacagctgcagtgggctccggtgggcctgtactccagcctacgacagagagagactctgtctcttaaaaactactttatttttaaaatggcagcaggcgttgctttgcctcaggagagttggacgccgagcccttttgcgggtactcaccagaggcatttgtgctgcttggggtctgggcaccctcttgttgtggtgactgtgattcccatatcattttatctcacaacgttatgaaaaaagcctcattgccgtaacagcacagcaagacagcaagcaactgcgatcgccttggcagagaaggagaagcaaggaaaggagaccagagcagcgctcgtacctctgaagtcctctcccgcaatgcgacgtattagcccaaagtagaccgtggctatggccggggcggggcagctctgtttgtgagcacggaatcgaggctgggagctgcacactcacctgagcgttcacaaactcatcgtggagggtgtcaaatgcactcacggctgcgtgcacgtgtctgctgccttctctcagggagtacagatgctcccctatgctggggcttcaccttgtgtgtggaggaaaacactgtgggaactatgttggtgctgattttttttttttttttgatacggagtctcactctgttgcccaggctggagtgcagtggtgtgatctcggctcactgccacctctgcctcccaggttcaagtgattcccctgcctcagcctcccgagtagctgggactacaggcgaacgccaccacgcccagctaatttttgtatattttagtagagatggggtttcatcatgttggctaggctggccttgaactcctgacctcaggtgatccacccacctcggcctcccaaagtgctggggttacaggggtgagccaccgcgcccagccagtactgatttttaaatctatctgttcaatcatttcggctggagccatcattatcttgctgaagcagctgttggaatattaacaagaggcagtggtaacaagtggaatgtaattagcactccttgttccagtgaatttgcagttctaactgggaacaatttgcagtgagtttgtgtgtggctgtaattaacttcgcaagcacacaggcagcacagagcccatgggaccacagcccgggctgtgacctgcaggctgatccctctgagtcgcccctgagttcccaccggctgctcccgtgcgcgggtgcccctctctcagcctggcatgtgactgcctcctccaaacacccacctggtgtccaccattctggccctgccagcagctccttcattccatcatttatcccagtgttttccaagcacccaggatgcaccaggctgggacttgcccccagtcccacaaagctctgcactcctgggttccccagtaccccccaggaagactccatgccacacaggtggcaccaccttgctgggctcacgtggggaaaggatgagagagccgcccacctgggcagacaggtgcctgagccgggtgggaggtgggaacggagcccaggaccacacagggggtgccgaggagcttgcacacccaggaggctccctggaagaggaaggtttcaagcagctgccctcaggcaccccacgcgtgttgacagccaagcgtgacttcttgtcaagggcatcgttaaaggagaacatgaggcctgctcgggggctgagaggagagaggtgccagggcaggcgccccccgcacataccctgccactgccatgggatcccggcactgcagcctcctggtgaggcccatgtccagctggggttgcagagggtgcggtggcttcacaccccggattgaactcaccaccctcctctttccctcaagctttggtggctggagaatgacagtcgatggccagtgcctggtttgcagaggccgctcatcagcgtgaatccccctgcgtggtcagggccacctcccctttattgatgagaaactgaggcacaaatacattcagtgcctttagtgagtgtcacgcccagagggtgaccacctgccaaggtggggcataatgcacttggcttcccagcctgcagatgctggactctcacacagatggaccggacggaccggagcccgaggtccccagcgtgagacccattgttgttcttggcagtttattttcacatctttcccggaggcccagattcagcggttcttagacttaacctaagaatctctcaaaaccatgtaataaaatactccatctgcatagattaatttacttgcaatgaatacacagacttggagggcacaatcctatggccttttacaaatgtttacagccatgtgacaacaccccactcaaaatacgcaacacttcatcaccctggaaagttccctcatgccccttgcccagccgccacctaacccccaacaaaccaggcaatgacgttctgatttttatggtcagggagtagctttgcctattctagaacctcaagtaaaggtgattacgtagcgtgcacttctttgggtctggcttctctcactcaacatgatgtctgagagacgcctgttctggggtgagacgtggttctcgccttgttcttgctgagtagtattccactggacggacgtggcacaatggtggcgtttccattcaccatcagagaacacggagcttccttcccgattgaggataccacaaataaagctgctgtgaacatccacgtacaagtctttttgtgggtatgtttttattgctgttgcatgaacacctaggaatggaatcgctggatcctaagggaggtgtttgttttattttatgagaacgaccaactatctttcaaagtgatcaaagtgccttacactctcaacagcaatggattagatttccacttgacggcaggcaggatggccaggcatgtccgcctgggtcattctcacaggcacgcatggccccttgctgtcgttctaatttgcatttccctggtgactaatcgaaaggagcttttcatgtttgtctctttgttatgtcttacagaacctacttctgtattctgcatataagttatttgccaggcatctgaagggacttcaaaaagttcacggaaaaataaaattagaagataaaaataaaaatataaactttatttctcaacataagctccaccaaggtcaagacacttttgtaagtgatgataccagccatttagtccatccctaaggcactgagggtcctgggaatttaaccatctcaatgcagtctttttacattactaactgaagaaaaatgactgttctttaaaaataatttttaagattaggaagaaaaaagccagacggagccaaatcaaaactgtaaggtgggtgccagatgcctccagcatccccaaaacttgccataaccttggctcttgaccagtccacttttgctgtgacttgagcacctccgcctctccatagcctttgctttgattgggcctttccgcctctctgtagccgttgctgtgacttgagcacctcactctctccgtagccgttgctgtgacttgagcacctcagtctctccgtagccgttgctttgattgggctttgtcttcagcatggtactgggaaagccaagtctcctgttacaattcttcaaggaaatgcttcaggatcttgatcccacttgtttaaaatttccacggaaagctctgctcttgtctccagctgatctgggcacaacagttttggcacccatcgagtggaaaatttgcccaactttaatgtttcagtaagaattgtgccagctgaaccaactgagatgtctatggtgttggctattttttctgctgttaatcgctggtcctcttcaatgagggcatgaacaagattaattttttcctcaaaaactgatatggatagtctgccactgaaggcttcatcttcaatattgtcttgtctcttcttaaaacaggttatccacttgtaaactgctgatctcattgggacattgtccccataaactttttgtaaagtatcaatgatttcacattctttcacgaagcttcttcattaatttggtgtttcttctttcttgcttcaattttagcagaattcatgttgctccaataggagctcttttcaaacagatttcttttttttttttttttttttttttttttctgagatggagtttcactcttgttgcctaggctggagagcagtggtgcaatcttggctcactgcaacctctacctcccaggttcaagcacttctcctgcctcagcctcctgagtagctaggactacaggcatgcgccactacacccagctaatttttgtacctttagtagagacggggttatatcatgttgcccaggctggtctcaaactcctgacttcaggcaatccacccacctcggcctcccaaagtgctgggattacaggcttgagccgctgcgcctggcccaaactgatgtcttatccttcttagtgcctcacaccagatcctgttcagacatgttataacaaattagtatgagtttatttttgcacaatttttgacatctatgcatagtttttcacaatacacattttccttaaagggtttgaggacccttttgtgtgactgcagacgcttctacagtctgtgacttgtcttctccttttcctaaaggtggctttgatggtcttttaaaattttgattgaagaacaacttaccaatttaccagtttgggttaattttgggttaacgctttttgtaccttttctagggaatctttgcctatgtcaagatcaaaagcatgtcttggcctagttcataatgttagagggaagctgcaggatttctgtccatgcccttcgtgacacggaggtagatccaggtaccagtcgaattgaaattttcggtctgcatctgtttagatgatcatatagatttctcctttacgttaatatggtaaaaataaaatcactgatttttgaatattgaaccaatcttgcattctagagataaatattcctcggtcataatgcataatccttgtgttatattgctggatttgacttgttaatacatttggccctccatatctacaggtttctcattcacagattcagccaacctgagatggaaagtattcaaaagtaagataaataaaaaatgaagatacaaccataaaaaataatacagtataacaactatttacacagcatttacattctattaggtatataaataatctagggatggtttaaagtatatgggtggatatgggtatactatgcaaatacatactatgtgcaaatactgtgccattttatatgagtgacttgagcatcattggattttggtacccacaggggctcctgaaaccattcccccgcatgtgcatgtcaagggactgtaaagatggtctctgacttaaaatatttttactttaccatggtatgaaagcgataccggtaagtgctcaacttatgatggagttacatctggatgaacccaccgtaagtcaaaaatcctataagttgaaggcttagctggacatagccctatcgtaagttgaggagcacctgtattttgttaagggtttctatgtctttgttcataaggaatatttgctctgtaatgtcatttacttggaatgtcttcatcatcaactctggtatcaggattatgctggccttggtatgcaggagccaactcaccatggcccccaggggccaactgtgtgcatctctccccacctcacacaccagtgtcacgttggtagtgacgtcagccatggtgcaagtatgtacatcactggaattggcaaacactgcaaatcatacgtttcccccagaaagctaattgttaaatatttaccagtgaaccattggctggcctcataaaacaaatcatttttcttcatcctctattttctgagtttgtgtgagatttataatatctcttccttaagtgtttgacagaattcaccagtgaagccagctgtgcctggagtcttccttgtgctaatgtctggttgttaggaattcagtttatttaacagatgtgggtctattctctttcttctcatgtcagtttttgttagttgtgtttttctagggatttttctattttatccacattatctaatctattggcataaagttgttcataatactctcttattacccatctaatctttagaatactattcctgatgtagaaaatgtgtgttttatcttttgttcttgatcactcttgctaagggtttatcaactttatttatgttttcaaagagctaacttttggctgtgttttctctattgtttgcctattttctgcctcattgctttcttttcttaccattgtttttctcttccttctacttgttttaagtagagttgagtttaatttgctcttattttcctatcttcttagatggaaacttaaataactgattttagacattcagacctttctgcttttctaatataaacatttaaagctttcttgggagcactgctttagctgtatcccacaaattctgatatgttatatttttatttcatttcactagaaatatttcttggcttccattatggtcttttcttgaccccatgggatattcagaagtgcattgcttaatttccaaatattgagggctttcctaaatatcaaataaatttcttagttaattcttttgtaataatagaatatactcttaaagattccaaacttttgaaatgtattgaggcttatgttaaagtataacatatgatccgtcttagtgaattctccaaatatttgaaaaaaagtggatattctgcagcatttggtgtagggttctattaatgccaattaggtcaagttcattggtggtgttatctatatcttattactaatgttttgtctacttgttctatcaaagactgagaaaagggtgttaaaatctccaactatgattgtgagtttgtctatttctctctttaattatgtcagttttgtgtatggtcacatatttttaaattctcttattatgtgctacatatttttaaattctgttattatgtgctacatatttatgactgatgtcctgatgaaatgggccttttttcattgtgaaatatacctccttatctctgttgatgctacttgtcttagaccccaccctgtctggtatggatgcagccaccttggctttcctgtgctcactctttgtgtcacacgcacctgtccatctttgtaccttctaccaccctgggtcttccaagtgtgtctcctgggcacagcatgctgtcgggtcttgcttctttgatccagtgtgaccatttctgcctctgaacttgagggtataatccatctacatttgatacaattaggatacgtatggttcagtttaagtctaccatcttgctatttgttttctttttgttccacatggtttttgatcctatgttctactcctatcttcttttgggtaaataaaatgttttttagtattttattttatctcctctattgacttattataaataaaactttttagtcgttgctgtaggagttacaacagcatttttataacagacccttttacaattattaatcctgaaccactttatatacaacttaagtttatagcagtataatttcagaggccacttaaaattaatcctgaatcactttatatacaacttaagtttatagcaatgtaatttcatttactcaccccttgtttttggtgctattgttgacaaatacacttacttccacatatgttataaatttgacaatacttatggactcaaaatgtttacctttttcaatgcttttcattccctcctatggatattaaattacatctggtttcatttcactgcagcctggagaactttatttaatatttctggtagtttatgtctcctggcaatagattttcttggctttaaaaaaactcaaaatgtctttatttaaccctcatttatgaaggatagcttttattgaatatgttgcttgacaagctttttttccaaactaagcacttttaaggtattattccattgtcttcaggaatccattgtttaaaacgaatatcagctgtttccctgtgcctaggtgtcctttttctctgactgcttttaagattttctccttcttttcagtttgtggcagtttaccatgatatgcctctgtttggttttcttcgtatttgtcctgtttcttacacctgtgcattaatatttttcaccaaatttgggaaatatttggttattagtttttcaaattttttgctacctttttctctctctcctctttttgggattataattacatatatattaggccactttatatgttagttccatatattaacatataacatatattatccccacaggtcactaagactttattctttttatctattcttccaactggataatttcaattgatctctcctcaaatttactgatattttcttctgctgttaagccacacagtgaattcccatctgttcactcacatcctcaaaaatatttagaatgcattccaaagttcctgtctgcaaatgtcaacatctgtaccgttgcaagttctatttctatcttctgcattttttctttctttttttgtatttcaacatgtgtatgtttcatgtgtaactgctgtactgagatataacttacgtaccacgcagttcgctcacttaataaaagcatcattcaatggtgcgtggtatactcagagctgcgaaactatcctcacagtcaatttaagaacattttcatcatccccatcctcatgcccggcagcactccctcatcccctcccaggccctggcagccgagaatccactctgtgtctctgtggatttgcctgctccatgcatcctctatcaatggagtcatcggtcttttgtgtgtggcttctttcgtgttatatcatcttttcaaggctaattcgcattgtagcatgtgtctgaacaccactcgtttttaaggtgaataatactccatggtgcaaacagacttcgtgtgcccatccgttcctctgctgatgagcatttgggttgctgggaccatctgggccatctgaaaccccctggagcctgtgctgctgattctgacatcagtggtcccgagcacacacttggcaatcctgaagtctctgatagaacagcggctggcatcacccgggcacctgccacgtgccaagcatgcagctaaatgtcactcacgtggccccgcctgacctcacacagatgggctgggccgctgatggccccgtttgtcagatgaggagactggaggcagctccaggtcacagagctgcgagataacaggcaggagcccccagcgagtccagagctcaccctcccaggccccacctcccatggcctgcatcttcaatttccaggtcccaagcagctcaggactaggctgcttctggcttctgggtcctcccgggaagtcacagcctggcactgagaccaccagtcccagcatctgttttcccagcagccccgtgctggtgttttctgcagctgcatttgtgttctgttggcaaaagaggaacctgctctgcatggtcccaagcaacggacgggaatgtttaacttgtgtattgatctggcagctctccagtgacttgggatttgccacaataattcactttccacctgggtttgtttgtttgtttttgagagagggtctcgctctgctgcctaggctagagtacagtggcacaatcacggctcactgcagcctccacctcctgggctcaaatgatcttcccacttcagcctcctgagtagctgggactacaggcgtgtgccgccacacccagctaattcatattttgttttttgtagagacagggcctcactatgctgcccaggctggtcttaaactccctcctggcctccagcaatcctcctgcctagggcttacaaagcactggacctacaggcgtgagccaccacaccagcctgtctgggcattttgacatcatgcagacgcagcacagaactgacctgagggatccaacagctcacccgccctgaggtttctgggtctgcagctgggcccaggcctgcagtgcacacagctgttcccagcacgtgcctgtcccttcgactcagtgcacacaagaaaccagatgagcccacgactgctgggaccgaggctgcctcgagtcccccacaaccgaaatgtcccctccagacagaggcctggaacaaacaaggctcaactaaaaatagacttaagcatgagagattcagaggaaggcagctatttttggtttggtgtgtttttgcaaggaaagatgagaaaaagaggctccctcgaggctggagagggaagtgtgtaagaggggcacaggggacttggggagaagccacagctccttttgtctgtcctgggctgactcgtctgcctgaaatgttgaaatcccgacccccaggactgctaggggagctctagttggaagcagagtccttgcagatgttatcggttaagatggggtgacactggattggggggacctcaaattcagtaactgtccttataagaagtgggagatacggagacacaggtagaagccacgtgagatggggtgacagtgatgcggccaccagccaacggcagcagatttctctggtcgtttctctggctagagaaataacacctccccgagctgcatgtggtgcagcgggacccacacggtgaccccggctgtgcgtctgggagggcggtgggtgctggacccctccccaccaggagatgaaacacgtgcaatgacagcaacccaggcaagtccccggggagactcagagccccgggcggggaagggtggggaagggctgtcccaggaggaggcacttgccaaagaggcagtcgccatgctgttggctgcaggtcggggggagactgagacccacccaggtcagcaggggctgggagcgcgggtcagcagaacgccccagggaaaccgggtgggtgcagcatctgggaggggatttgccctgcgaggctcctcgtggggccctttaagccaccaggtctcccagtgggatcagagcaggatcccatggcctgaggtggggctgcgtctggctccagcccccacccctcatctgtgcccacgtgcaccccagcccagaccacgcccagctgatcacaggccgggcgagcttgaaggtgcttggagaggtcagagtccagccaggctgggtctcagagcgacccccgtctctagcctcagacaaggtgcccctctccagccctcagacactggcctggcctgatgagagggacatggctggcagaggtttcttcccaggtttgatcagagccagagcaggggaaagtttccctgttgggggtgtcgatactttgggaaaatgggttcctggtcccaaggttgacgtccccctggcagagtgggccgcaccgaggtcaggacacgaagggtcttctcctgggtctgctggagtcgggggcaacctgcagccttaggggtggggggtgcgggtgtcatggacgtcagccccacctcctctcctgcagccacctgaggcccacccacctcctcatccctgtgcccaaacccgcaccctggtgcccagcacttgggggcgcccacagatgtgtccgtgaccaccttgggaagtggctatgcgtgtgccgcagccccaccggggtggctgggaggtgccctcggaatgattcatgcagtgacttccctgtggcctggcccatggcaagtgctctggggacgtgatggtggtgcagggaacatcgccccgggcctgcagctcccgcccacgagctgtgcccaaacctcccctcaggcctgcagctcccgcccacgagctgtgcccaaacttccgctaaggccttgggcccagctggatgcagggagcagggggtgcgctgggcagagaggggtctccaggcagggaccttaaaaaaggatcccttccgtgctgccggtcaggcccctccaagtactctctggaaaaggatttcaaagtccagccccgtgccgtccacccaggcttccctgagagccacgccccagggccctgtttcttgagaaaatcccagcatgaaaaacagttgggaggaaaacagtttgctgggtctccaaggcccctcggagagcaccctcccgaggaggcctctgagccacctggtgccaccggaacagctgcagccgcctggagagccagagggagccgggtggggcccgggggtggcgctggcatcgcggaacacccccgcccgcgttccaaacgaaagcacatcacccccaagcgacgcgacctaggggcgagttttaaaaggagcacttacttatttttagagtgtgcttttcactcaggatcacacgacggagctaaattgcaataaaaatagtgcaatcccgccagcaagaagcccattcggcaacgtgtccttttgttcaaaataaagtgcaaaatgatttctcgcaataacaccagcaaccggcttcaaaggccagctgggttggctcaggataaatgactaagcgtacgccgagccctgcggaggaagctcagccggccggggctttgctccagagcttccttttccaaaacagatgcttgggaccaagatggagccagggaagccgggttgggtgacggcgtccgggttcctaggctggcaggctcggaggccagagggcaggcgtcccttcgggtactgactcctggggcaggcaacagattcctcctgggaggcccaggcggaggcagcacagcatctctctgttttcctgcaggccgacggggatcctcagtgtggtccgctaggaagatgagtgagccccagagctgagtgtgtttgggctgtggattgtgatgcagctggaaaaacacaaccaggaccacccagcaggaagcacaggaagactaaggcacagagagggtcaagaactggccaaggtcacacagcaggtgtgtggggagctgggatttgaacccagctccagagtgtgtgccttgacccctcactgccgtccacaaggggaccaatgagggtcccttcccccagcaagtgccagacgagtcctactttactgctccttgcggtgctcccccctcggcacacctgagccgcctggagccactcgggcaaacctcaggcgttccactccgataagggtgtcagggaagagcgagggactgtgcttcagggggagagctcaggctgagagaggagagccaggcccgggggtagggtggcgaggggccacccaagggggccacaccacctccctgcttgccactgcgggctggacccgctctgcccgcctatctcctccaccgcctgggagaagacccatcctgggggcccagagggtggggcagggtggaagtggcctcggtcctctgctcccgagagtcctgcctgtgcccagtgtggctgaagtgacccagagcccgggaggacgtggaggacaaggctggcccagtgcctctcgagtcctgggctttggcttctccagaagcagcccctccacagaggaggcctctgacgtgtccaaggcctcagctatgtcccaggaaagcgggtttctgggtgagctattcctcctctggggagaatggaagccagcctgccctatggggctgaggtggctgagccagacccacaccctgagctgtcccgtctgggacgtgagcaggactcttggagaaacaacccttgcagatgctctgtggatgacagtgaggggtcatggcacacactctggagccaggtggccagactcaaaccccagctccctacacatgtgctgtgtgaccctggacctgttctttagcctttctgtgccttagtcaccgcacctgcaaaacgaggctgcagcagcttactcagagaggaataaaggctgaggacctgggtctttacctgctggctctcctggccccccccggggctctgagacacaaagtcgcacaggggtgggtcccactggaggaggggtcagtgtagaggtcccattttgctaatggataaaactttttctcattttgattaataatgactaaaaactgtgtttattattcctttgttttctgtcctgctgggacttcagtcaaaaaatgattctcatagactctgagtcaaggtgccggagggacagggtctttctaaacggcatttcgcaaggcccgccggaggaggtgcagtgccaagatgcaaaacagaaccagcaataattcaactctgaatattttgcctttaattacaataaactaataaagatttcagatgctctcattttaatagaatgaggagttataattggtgacctattttaggcaatttaatttccaatgacctgttttccaaattaacatagtaatcaaggccagggtgccgttcagggagtcagaccctccaagggtcccacacctgcaccgcgtacaggcgcatctcttactaacgtgctcatagaaggaggtgctaaattatggaaaggttcctttctacagcatctaatgagcctggatttttaaatcaaagcataatcaaagaaaatgagcaaggacatcttgagcatctgtaaaatcactgttgaagccacaaccctcaatgacttcgaagctcttctcaggactggagtgtatgtcctccccgaggtagagatcgctctcagaggctccttcaaaaacccccaggcaggagggagggtgagtcgcacacctcggcctcaggtgccctcccgctgcctcccagggaccaccgtgcagggccaccaagaacaggcaggggggagggggagcaaggtggggaaggtggggcagaagagagaagcaggaaggagggagaggaaagagaagagggagatggactggcctcagccaccccggagtacagggatgtcatcacaccagccctccagcggctgaaagagccagtgagaggcaggtgggggtgtggatcaggcctgatctcccctagtctcctcctgcaatgcccagattcttgcccccgtccttccttctccctcctcccttcctcctccctcctcttccctccctcctgcttcctccctctgccctccctcctccctcttcctccctcctcctccttcctgcttcctccctctgccctccctcctccctcttcctccctcctcctcccctctcctctttcctcctccctctcccttcctcctcctcccccctttcccaccctcctccccctttccctccctcctcccgactccctctccccttctccctcttctcatcccttcctcctcctccctcctcccttcctcctcctccctccttcctccctcctccctcctccccacactgtccatttgcaggctgcctggtcctagcccatatccaagggcctgtctcagctacaaagttctgctctctgcttttaaatgaggacacaaggtggtttccaaaacacatgtacaaggcagaaattgctcttgaaacagcagacaagcaagacacagccctccctcctgttcacattagaggctgcaggcaaccccagttgtctcagaaatgggaacaagccccctgctcagcagagctggtttcccatggatagagctgttggctttctggaaacctttttctccccaccctagaccccaaacatccttggggttgtgtaagaaggaaggggatgtcccaggctggaggctggcagggcagctggaatacgggagtgggaggggagggaggaggcgagcagggagcagggccagttctcctacatgccttcttccggcctcttcttccccactcggggttctcacaggtcccgcccttggtgccagtgatgtctcttctgcacctgctaaagggcagaggggccccttggaggcagctccatccaggcctggctgagatgtccaagaggcagcagggtacaggggtgcaggttaaccctgccccagagtctctgtccaggagcagcaggagcaggctcaggacggcttcagctccatggctgccctgggtggaagtcaggctggatacagaggccaggtctacggaccctgcaggcctcagaggaggaagttctgttttgggagcccactggttcctggggcccatgagccccacctacttcccaccagcagcatcttccccttgccccactgcagcccctggacacagtacagcacagggcggagtgagggctgggagggcctttgtggagtcccactggcttcaggtgaagatagtggccctggctgaccccaagcctgatccccagtgggcctgctcctctcttctcaccccgccacttctctgggccttttccaagccaaactctgctccctcattcaataaaatctctcccgcaagccagccccctgggcctccacccgcccatggcctccgcagtggccaggagcctgcgggagaaggtggcatctcttcccttccgtaaaatctccccgccctatttacaggagaaacaatgctctgtggctcccagccagccctgtctcccctgaccttgagcacctttgtctaaagggatgccctccttaattctgtgctgagctggattaatttttaaagatgaagctcctggctcgtgtgtgctgctatttgtggtggcgaggtcaggcagagtgccggcccggggagcaggaggtattagcgggcactaattccctggggacagcaggccgggattatcgctgtgtgcccagcccttgccagccctgctggctgccagctgctggcaggggcctcactgtgccaggctggtggcagcccacagtgcactggccacatggagcgcactgggtcacggagctctggattcaggtgggattatgccccccaccgccaaagccatccttcctggcagcaaaggcctgtgggctgtggctgcacctctttcctgggtccagtttccccccagggattcaaagttcctggcccttttgtggctagggtgaccacagatgactcacttggggcgctagctggggaggctaaggagtcctccatcagccccccagcgcttcctgcagagcccattgggcgtcctatgacggagggccctgcaatgatgccaggtttcaaggtgtgcaaggggaggctcctgccttgggcaggtttgtctgtctagagaaataacacctccctgtgccaacaacagggaaactgacggggtgagatgcacgttacagcagcgagggaaactgacggggtgagatgcacgttacagcagcgagggaaactgacggggtgagatgcacgttacagcagcgagggaaactgacggggtgagatgcacgttacagcagcgagggaaactgacggggtgagatgcacgttacagcagcgagggaaactgacggggtgagatgcacgttacagcagcgagggaaactgacggggtgagatgcacgttacagcagcgagggaaactgacggggtgagatgcacgttacagcagcgagggaaactgacggggtgagatgcacgttacagcagcgagggaaactgacggggtgagatgcacgttacagcagcgagggaaactgacggggtgagatgcacgttacagcagggagggaaactgacggggtgagatgcacgttacagcagggagggaaactgacggggtgagatgcacgttacagcagcgagggctggaagagtgcagcgcaggcgcctggtccctgggcttctccaaaacagtgtagtgtcagcctctcccaggagctcctcagaaacagaatcctaggcctcacctcagaccctcttcatccaagtccacattttcacaagacctccaggcaactcaaacacacatttatgtttgagaagtgctgctgccctgttaggctcctgggggaggtcagtcctagaggtgggggccttgcagatgggcagagccacgtgggaagcagtgtgtggtccctgagccagagggtcatcagggcctgaagctcccccaagcacaagagggcgccggtgcagccatcgccccatcacactcctcctttagaaagcaaaagaggccgggcgcggtggctcacacctgtaatccgagcactttgggaggccgaggcaggcagatcacgaggtcaggagttcgagaccagcctggccaatatggtgaaaccccgtttctactaaaaatacaaaaatttgccaggcgtggtggcacatgcttgtaatcccagctactctggaggctgaggtaggagaatcgtttgaacccaggaggcggcgcttgcagtaagccgagatcatgccattgcactccagcctgggtgacagggtgagactccgtctcaaaaaaaaaaagcaaaagagctcccaggaaggtgctcacgctcctgaacgagggtgggaaggtgcccacgctcctgaacgagggtgggaaggtgcccacgctcctgagtgagggtgggaaggtgcccacactcctgagtgagcgtgcacatgcttacaactgcgtttcccctgctcaagatcctcacagcacttagaggacaggagggttgtcagcgctgagtcctgatcacacaggcttagtgttcagcaggtggttggggaacacgtggatggataggtgaatgactgggtgggtgggtggaaggatgaatgaatagaaggacggatgggtaggaggataattcaggggatggatggatggatggatggatggatggatggatggatggtggatagggggtgggtgggttgtggatggggatggatggggatgggtgactggatggtgaatggtggatggatggtgggtggggtgtggatggatggtggctgggtggatgagtaggtgggtgaatggtggatgggggatgggtgaatagatggtgggtgggttgtggatggtggatgggtggtggatggtggatggattgtgggtgggttgtggttggtggatggatggtggatggatggtgggtgggctgtggatggtggatggatggtagctaggtgggtggatagatggtggattggtggtggattgatggtggatgagtggatggtggatggaggattaggtgggtgaatggatgactttagtctccagagagtaagaaaagcaagacgaactctagtacgccactggtgggaatgtgaaatgtcataggtactttgggaaatagtctggcagttcctcaaaacctctggggtaggctgtgaggtccctcccagggctcagccgtggggccccatgtactcaggtggtgctcacccagccctggggggcattcttttggggtaaacacagttacctcgtgacccagcaattctgctcctaggcatgtagcaaggaaaaatgaaaacacgcagccatacaaaagcacgtgcacccacgttcacagcagccatacaaaagcacgtgcacccacgttcacagcagccatacaaaagcacgtgcacccacgttcacagcagccatacaaaaacacgtgcacccacgttcacagcagtttcattcatgacgagccgaaacgtggagacaacccagatgtctatcctgatgaacagatcaggaaaacggggcacacccagacaaagggatgtgatagggtcacaaaaggactgatgtgcagattcatgctacaacgtcagggagcctcgcaaacgtcgtgctcagtgaataaacagacacacacgacagcatgtatcgtgtggttctgtgtgtatgacacatccagaataggcaaatccttccaaagagacagaaggtagaggcgcggtcgctgggacagatgtggggacgggcaaggtaaagcagcacagaccttcctttgggggataaaaatgttctaaagcggatcaggggtgatggctgcacgggcctgtgactatgctggccgggggccggggcgggtggctcacgcctgtaatcccagcactgtgggaggccgaggcaggcggatcacgaggtcaggagttcgagaccagcctggccaacacggtgaaaccctgtctctattaaaaatacaaaaattagctggatgtggtggcgcacgcctgtaatcccagctactggggaggctgaggcagaagatttgcttgaacctgggaggcggaggttgcagtgagccgagattacactactgcactccagcctggcgacagaacgaaactctgtctcaaaaaaaaaaaaacattaaaaaaaagtgaccgtgctaagaattattgaattgtgcggtttgaaagagtgaagtggggcatgtgggttgtatctcagtaaagctattagttacccaagaaaagcacagaaagcgagatggtcaggcccatcaccctgcttcctcccaggggcctgtgggtgaggctcaactcaggagctggggaacaaggacaaggccctgggccgggcgtctgtggggccaccttgcaccatgctgccagccccagcctgctccgctcctcacctctgggcctggccctgcacagactgggtcaccctcttttcacaaggcaggacagcactgtgcttcctgttcagcccaggctgtccatttcccaccagagggaggggagcagtgagcccccccccaggggctcatcagattgggggatcccatgtgcccagggaggcaatctctgagccccgcagccctggcctgtggaagcagcctgatggccatgcatttcagaaacacccactaggagctgggccacacctctcgttaaaagctggacagccaaggccccagggctggccctgggcaagtctcctgtcagctatgggatccactggtagggtctacaggctgatggagccaggagcgggcaaacatcccactttggtcccagagggcactgtgcagcttctgccgtcacaggggacattcccaagtgaccagaggggacatccaccctgagcagctccactgttgggggcctcaggctatgtggctgggctgagctgccagctcccaaacaggacgttggcctcttctgacatccaagctctggcaggggcatgtgtcctgctggatgggactggacaatcctcacgggctaggggaagtatagcccagggcagccaggggaggctcctctccatggagggaggaccccaaggccagggtgctttcctgagcactcaggactgccatgggaaaagcaggcccctgtcagccgtgtgcacagcccctcccacacctgcctgggaaaagtgaggccttagagcccgggaggcaaatctgctccaaccctggaggtgcagagaccaaagccaggggaggcttgctgaggacacctgccgaggggccttgggatctgggccagaactgcagcatggctgggagcccctgggcccatctggaggaggctgagtggtaacaggcgccctagcttcacactagccacccactgccccccactcagtcacctcctctgctgcccatactgagacccggtggctcaaccaagactttggaaggacaaaccggtggtcatgggtcacgtgcccaccgttcaaggccccaagaagccccctccattgctgctctgtcccggaggttcctgcaaggaacacaccttttgcttccatggtgacatttgcggtgctgttttaggcttttccgcctctttccttcacagggtcctggggcaccacaccagggaggcctggccgggcacacacagaggacagtgggaagtaagcaccagggcccggcctcctgcctgaggggtcagccagccgctgaccacgtcctgtagctcctaacgtaagctttgcacccaagaacaaggggcccttccagcccctgactccccagttaacccccaaacactacagagtgttggccacagtcacacacatccagccccaggagggcctctgcctcctcccttgacctccaagtccccttcctgccattccctgccctgggtgcccccactcccgcctttgactcaccccatggccatttgcagacgtggagcccctggcaaggttcacctgcgccaggatcccaccacctcctccgcctccagtggccatgcaggcccgctgaccacatccctactgggcacatgttggaccccaaatttcctgtccaccagaccctcagactatgagcttatctggaataagggtctttgcagacataacgaagggaaagatactgaaatgaggccaccatgcatgagggtgggtcccaaatccagtgagacagagaagcagagatggacacaaattcggagaagaacaccacgtgaagaggggagccgaggctggagcgaggcagccacaagccaagggacgcttggggccattgaaagtttgaagaggcaggaaggacatcccccaccaacagagctcctggaggaagcaggccctgtccacaccttgatttcagatccttgatctccagaacatgagggaagaattttctgttgttttctggctccctccacagctcttagcgctgtggggctgcagactggtctcctggctaaccagagagcccgtgctgatagagccactgctcagccctgcctgcacccagcatccagcgtggggcctggaccgtcattgtgtcctggtagatattggtcaaatatggaatgaaagagccttggagtcagacacagggctgaacgagtccttttcaggccatggtctaagctccacacggcacctggagcaccgccgtggcacccgctggggtccacaaacacctcccggcctgaaaaggggaatcccagcctttccatgatctctggagatttgggacacttgtgaatcatgcatcggctttacaggacgctctggggcttagggagttgacaggtcaacagtcggatagaccgtccagggaagctcccaggaagtggagcaagctcgggcgggcagatgccgggtgtctcctgggacctgctgcaaatgccctccccacctgcccaaccccaccccctaccccagacagagagcatagcccctgcctgccaggaagggtgagcgcccagcacaaacagattcagggcctcccgctgccccagaggacctctacattcatcaacccttgacgtggttttcaattagcgtggaggaaccagggtttatcgctcttctccgtcactccatttatatttaatgcatttattgcccacattctatatcaggaacaactgcctagaggctgcccatccccagggagcagggttttattttcctttcctcgcaatcgatcagagattaagttgctgtgtagctttttattggagacacacatttgctgtgtttaacaggaaaccagagaaggaagctcagcgtgggccataaatgattttgcttccattgatcaaagaaaagactgcccacatcagtcatcatcacccaatgcactctctgagggcaccctatatatgctcaggcacacacatgcacacgggcacacactatccaagaggagagagagccttgagatggactcaatggctcctggacactaccctcggctcccccacagcctcctagtggcttcaccaggggtggacatccagactttgtcacagctgaaagccccacctggcctgtgagggagcatctgcagccccggacagctgccctgaagttggccctgtgcagaatggtagaccctttggacccacattggtccatggaatggcagaagcctgttgtccttccgctggctggggcctgagcatcaaagtcatctttgcttcagaatcaaggaacctgggagggctgaaagccaaccctccatcccaccatgctgatggcggccacggctccccagtgactcaggtttggggatcctggttggtgataatgaagtgagcagcacaggatgccctgccagggccaggggtctatgcccccatgtcccctacccctgagcaggtgagctggtaccgagacaggcagcaggtgcactcccaagtctttgagacgctgctggcaggaagtgttcccttccggatctgtcctctcacgcacatgagtgcgcacacacacacacaggcacttgccatggcacagagacatgttccaccagaagcctgtggactactcgcttgggctttaggggaggaaaagggaaaagggaggaattgctaggcaaccagccaggggttgctatggcattttcaagagagcggctgggccaatcaaggctgactgcaggcaggcggaggcgggagccaccatgtcacagcagctcagacagaggggagcacactgctgcacaggcctggggagggctggcgcctcatgaatatgcatcaggctgattgaggcaaagtcaattaacgacttgacggcttgatttcccctggattctactcttctcctttaaccatttggctgacacagggcaggctccccgctttcctgctggccccggagttttctaacaggtccaatttgctttcctaatcctgacctggcccaggggtcctggcattgcttggtgctgtttctactgaaatcttctgccacctatgcaggcagccaggtcgctggtcccacagtgggtcccttggtgccctggcaaggcctgaattcctacctgggaccaggcacagtgcagcagctcctgcaggagatggtccagttaccccccttggacagttaccaactagcgaccacaggcctggccgacacacatctgggcaatgacctcacaacccctgggagcatctaggcacaaccagttttgtgggtggcggttggagaaagctgggggccagcccagggcaggatctccttcctgggctctgcagcagtttctcatctactgcagtggggttctggccagagcagtcagaaagcatgaaggaggcactgctcgcttcctccacgtgactcctggggtgcaagctggggcagggaccccggctctgccagaacccccagggggctagcagggtctttgctggattatatttctccttcatttcattgttctccccagtgaattctggggattctgagaattccattttgccctgaatcatacgcagctcttttgacagcttcagaagtggacgtcctgttgtgtgcagcggggagaatgtcaaccctatgattaacgccccacatggtggtgggaagaggctgggatgcctcaagtcccaggcccagaggatggtgggcctcacaaaacttgggtgcagggtgttgcagaggtccgtgcaagaagggaccccgaagctggaagctaaccgccactggcttctcaggaagtccccttgaccagaacccagtcccagacatatgaatcagtagccaaagagggccacaaactctgggtgctggccccgtgcctggctctgggggcagagacacacgggcccttagggctgagaactcaggtggaggggtctggggtgggagggttagtggcaaggaatgcacgggaagaacacagtcagcggccatggacctggatcctgttcacgcacctcaggcccacacggtgggcaggacgggttagagccgccacctgggtccaatcggccgggtgggggcagcccaggaaggtgttcccaggagcagaccccaggttccctgttgcagcccatcccgtggcccgcaggctgcctaatctccctgctgcagctcccatttgcttggcctgcagaaggttttcaaccacagccgagcaaggtccttaggcaccttcaaggctgagacattcgcccctgatccactgactgtgggctctcgggagagcggccacacccctctcaccatcaacagtcacctgggcctggccctcatgggagacagactcggccagcacctcccactgccccctagttgggaggaaccccactctcacctggggctcccgtctgcaagctccaggtggtaggaccgacctgggtcactctcgaaccccacactcagcttgtggcccccacacatgctcacccacccatcgccgcaaccgtttaaagagcaagggcccacaccgcacactcagagcagaggcggccttccgaagagagggcgggcacacatggaagccactctcttcagcactgaactgaaagacccgggctgccctgagcttgggatgcgggaggcacctggacaagcagggagggcagagccactcacagagctcagggccaagctcatggccagggacaacttctctgggtcctgctgccccgaatcctccattaggcctacaatggacaagggaggcatcacccttgaacccagcttttgagagagccccactcaaggaaggatgagagcgagcacctcctgtccctccccggccccaaagccctcgagctgccccttctgcccaacacctgtggtgcccctgcactcagtaggtgcttcatgtatgctccatggacagggaagtgaacacctgggcatccgcacaaggaggtggcacgcacttatattgggatgagggacgtgtacttccaccagaggccggggctgcccatcggccagcatttcccaaagtgtatcctgggtcgcacctcgaagttgctctgaagaaagaccagggcctcctcctggaagccggtggctcctgggtcttcactgctattgttccctccacatgggagggtgggggctgccaccatgtcatgcacagggtgcaccctcagacagcatgcaccccagggcacacggcaaacggcagagctggcctccaccagggctgtgcggggctgcactagatccagctttccggggctccagggggttcctcaccagctcctctgaacacgctacaggcccagttgactgtcactttcactgttagggagcatgaggcgttagaatcaatcctgtgacaccactgtgttgtcaggaacgggccgtgccaaggggcaccactaggtcaggcctcaaggtctcagctccaggatgcctcacccagagcaagacccaggctgtctgcaggacaaagacgtcggaaggaagaagagggagaagccaggaaggtggaggtctctgagaagatgtggtgacaccagggcccaagggctccccagcttatggtggagggcactgcctgtcttggtgtccatgaaactttggatgaggaacagcaggaggacaggacccaggcaggagcttccagctcagggaacgacacgccaggtggaaagaacggagccccggacgccgaggacgggaacaggatcacgggcacctggatgcaccaggagggcgagagaatcaggaggggaaaggaggaagaaggccttcagttcaggaggagaagggccttgcaatgcagagacctcgcagacgcgccgtcggcctgtggccaaggtcaacacaaatgtgcacggcctgggctgtggcatggaggccttcatctctctgctcttctcccagagacaaattcgctacaggacatccaacagggcacccggccactcccctggaggcccaggtcaccatgcacagggccggtgagaccacggggacagcctcccggtctttcctgcaggggaagactgggaatcggctgctcctgcagccccagtctcatcatctgtgaaacaaagacaaggaaacccgttttatagccacagctcagtctttgactaagtcacatcctcattgctcctgtttccacagagcagacaccgacgtccagacatccagactggctgccaccagctcactggaatggccagcccgtcccgccgaggccagtggacatgccaaatccctcccgcaacaagttgctatccatcccctcgactaatacttaccaaattaattccagatttggagtcactcatggttcccaccagcactcagccccatctcagcccccatctcagcccccaccgcagcctcacctcagtgcccacctcagccccctcctcagcccccacctcagcccccacctccgcccccacctcagcccctcctcagcccccacctccgcccccacctcagaccctcctcagcccctcctcatcccctcctcagcagctgctggaatgggctaccctcaggagttggcaccccacaggctccttcccttcccacctccgccacaccctgacgagggaaaaatggggagctgctgggagggaacttgcaccctgttgggcgccttgtatccccagcctcctctcacaccacaggctgctggggccccgtcagcggagcacggctgcagcgaatgttgaaaccaccagttcccattcctagcagggctgaaagaaggaggacacctggaacctgctttcttgctgctgcccttgggggtggcccactctggcagctgcagcctcgaacctggctcactgaggggtgtgtgggggaactggggggtccctggggtcggtcctaggaggaaaaggtggcagttgtccatgctttctggggacgcccagggaaactccgccctgtggagaccggagcttggctcagcccctccctcctgccctacctctgtcctttccagccagtggcaacaaagcccaggtgtgaggcgcccctggcaggcgtctgggcctggctctgaggggccagcgggcatgggaggggctggcagggcggcccttgtgttctctgctttggaaggagatagaacagtggtgccagcccacccgcagatacggcggcacgcagaggcctcatctgccccttctgaggcaaagcctctggaggagccccacaccgggccccccaggcagcagcacctcctggtcctatcatgtgagacacacagcccgagaggacgcctgaggtccggcggggacagcaggaagcattcagggaaggcgctccccaagatggaccatggtgaggctcccgccccgggtcctcaggtgcagctggctcagggaaggcgctccccaagatggaccatggcgaggctcccgccccaggtcctcaggtgcagctggcaccctcatttcctgggatgtgagacccacgccctggatgacgtccctctgtcctcttcacggtggctcctgccctgtgagaccccagaatcttccagagagactccacagcctgcagcgagcctgtttgctgagctcctggggcaggacagccagaccccgaccaccctgatggtaccactgcagctttgcgaatggcatgtcccctccaaaacctgctgcccagaggggaggagaagggatgcaaggcaggttccaggtgcttctgttttgaattaaaccaaattatgaacaaaacagccccataggaagggccttgggatggcaccagccaccacccaggcctcggcaggccccagccagggacccggggaccccacgtgccagccctggggcagtagcatggcacagacacagcagtgagcgcctccgtggctgccccacccagcctggagcttggcgccctgcaggcatggttccaggtccctcttcagagctgggaatgataagcagactgctgggaccccatcctcacccacacctgcgtggcgggactgctggctgccttgatctacccctacaggggctgatatcctgtggcaccccaagccccccgatgaccctcagccagccagcacacaggagagtccccaaggctcggtgtaggggccctgcaggcagtggtgagatgcagggtctgcgtttcccaggccgggcagtgcaaagccaggagcaaaggcacccctcaccatgtggcacctcctgcccctgctggcagagcccacagatcccaggcacaggatggggagggcagtgtggctccctcccaggcctcagggagtacagggacatctgggcagagggtgggcaggatttcaggcatcctaccccctgctaagggaggcccccggaaatcaggaattggggcctagggagctgagcaagcctggtccattctctagaagtttctcctcctgcagggctggaaagataggttgctcttctggtctgttctctgtaaatgctcccccaacatccctgggtggggtttcctcttcccaaagcctgcagggcctgaagggtgagcccctcacttggtctctgcagcctccatcgtcaaccctcagggctcctgtcctcctctccctgcaccctccctcagcattaggtgggggttcctgtaaagctctggggtcagggtctggccctcaagatccctgtgaatttggcgactgcatcactcttaccactgccaccttccctgttctgctcagggccaggttgctccactctgccctagtctcctggggcagctctgagcttctgcacagtcaccttcggaatgcaggcacctcccagtccccggatctcccagcactgtttcacccctcgttgggtggagctcaggaagggcctaagctctccccatccctgcctctcgccccacccctgcctggcatcctcaacagcctcactggtcccccaccagaaggctcttcccttccatcaacctgcacagagactgttgctggcgggggaaccagggtgaaggtgcctctctgggctcccagagtttcttgccctggtctgaggggcaggaagtcctgccattgatgccttccctcccagtaaagacaactggcaaagaaacagatggtgcccttgagctgaggattgcaggagggtttaacaagtgacacgggcagttgtggggaaacccagggacagaacggcatcctggggctggagaggttgaggctgccacccctccagaccagagggatgtggtgagtagtcctgcaaggggcttgggggctgacactccctcccctcctttccctcacatcctcccctccctcagccaaagccagaggctcagagcccatggtgcagcacaggtggccaccagagccaaggggaggaggggatctctgtgcactggctgggatgcagcacatcttcacagtcagtcattcacacattagtgagaatttgtgtctaagccacttccaagggaagatatagggagaaagaaggcttggaaagacagtgggaaacagagctgcacaaagtggtcctggggatggccaagggatgagaccatggtgcacctccaagggcccagttcatcctttgcctctgctcctccccagcagacacattcagctgcctctcctgagaatgcaggcccacactcccttgtccagcctgagaagcccccagtgacaaggagagtgccccagatagccccagggtcagcccaccccaatctgatgccaactccaggcacaactcccatcaggcgagcgtgggaggaaaatagcagattttcaaaagtcacaaattagagcatgaaatccaatgcttgacataagccttctgtgcagaaaccgtgaggccctccagaagcatggaagcccctgtggcgactgagcccctttcctgacagaagatctcccttctatccactctttcgtttaagtaactgtgttttaaagacagctttctatttccgctattagtggaaaatcactatcacttgccctaaataaacaataccctaaatgaacacaactgcacttaaacaggctcacctgcccctacccacgtcgcacagccactgaaggctctgagcccagcgcctgccctcattgtcaaaacaaggacattctggagtgtctgagactcgaagacaaaccagcactaacaggtcctttctctgcaccctacaggtgcgccatccttagcccccaccccaggataccgccctgttaggtccaccctgcctgctttcccagagctgccccaggcagagggccagccccaggcaggcagctgggcacaaggagcaggctgtgtgtccttccctgcagcaagacccaggacagcacagagacccatgcctctctgcgacccggggaaatcccagggctctcatgccccctccctggagggtctgcactggtcagacaggaggggtgcattctgcctggtgggctgctgttctgctcagccccaggaatccctcccatttcttaagcccatccttccttgggcttgtcctctcctcccctgcccctagatgcctggccccagttacacagggaggtaggcggccctagggcaatggcctggggtggacgctccagtttcttcccagcatggcacactcctgtggcatttgacttagcggtggagggggcatcccccaagagtgaggtaagagaatacccatgtccctaaaagcagacagcagcctgagaagtccctttgatggccctcctttcttgctggagtcattcctgagaggtaaatggaaagagatggagatgagcaagaggaagttgaggaggaagatggtgcagcgatgagagagaaccaagaaaaggcgagatggcaacacatagacctatgggagagacattcagagatgaggagaatcatagaggccagaaggagagatgcagagacaggggagacacagagaccggggagagacagagacagagaccagggaagagacagcgaccaggggagagacagagaccagggaagagacagtgaccaggggagagacagagaccaggggagagacagagaccggggagagacacagagaccaagggagagacacagagaccaaagagagagacagagaccaggggaaagacacagagacagggggagacagagaccaggggagagacacagagaccaggaaagagacagagacggggggagacacagagactgggaggacagagaccagggagagagacacagagacacaggagagacacagagacatgggagagactcagagacaggagagagaaagagacgaggggagagacacagaaaccaggggagacacagagacaggggagagacagagaccggggagagacagagaccaggggagagacagtgaccaggggagagacacagagaccaggggagagacacagaaaccaggggggggcacagagactgggggggacacagagaccagggggagagacacagagacacgggagagacacagagactggcaaaaacacagagaccaggggagagactcagagacaggaaagagacagagaccaggggagagacacagagacccaggggcaggtgctgagagagtgatggggacctgaaccctgagaaaggactggcagatgtgtcctggagggagggacagaacaagggccgttccagccctaccccgggaccatgagctgcaggccatccagcagctgtcagcccagccaaggatggccttgttctctgcaccccgagccaagccacttctgagggagctccacctttggaggattggtgcctgggccagctgggccccacaagcgcctctgtggtggagctccctctggtggggtcctgagtgctggggccgctgagaacatagggggaggggcattgagccaagtcccgcccttgtgaccaggagggggctccatgggggacacctgagggcctgaggaaggagagggcgccctgtcagatgccgcctgctcccacttagaggtcaggctgtaactgaggaggccacacagagtccccaccccatgtggactcagggacaaagagccctcaccctgtggccacgctggccgcatccaactttgctgggtcccatggagggggacccagggctgggagagaccctgccccagctctgcgtaggtctgttctgggtggtcctgaggcccaggttcaaaaggaaagtgccctaaatgggtgtcctgctgcatgcctggggtggccccaaagccaagcaggaggggttcccgctggaggagtcgaggccacaaggccccagagccttctcgaagctcctgctctcaaactcctccatctttctagagaagagagcagtgctggggcaagctgctcacccctcactcctccagggtaatttgctgacaccaagatccctaggtggggccagcaggggccagcctccctaccctccccgcaacacaccctctaggaccctaggctaggcttggaggcaatgggaaggaggcagctgcccaaagccaagaggcgccctgtagagggggccagccctgggcaaggggcgggggccgggggctgctggcccaggctccatatccccaattccccagcaacagtgcatggccagggaggctgggactggccaggttcgcacctcaggctgaaatattggcccctggggaacaaaaggcctattcccgccatgggccaggcacccagctcccctcgctccacactggctcccgcctccctgcccgcccaggcgcagtgcttacctggcctctattctgcccagctctcagcccagtagctctggcgggacccacaaggagttccgcctctgggacggtcagtccaaggtctatgtattccttctcactggggccagggaggagggggccaggccgggagcagagagaaaggggccgtggcctcatttccatgcggaggccccaggccctgtgctatccccaccctattgtgcgcctgggcgggctgacaatcgaggtctttgtggtcggttgctgcactcccaccctcagcgctcaggcaggcggggtccctgccacccgctacaaagggtgaggaggagcaagaccaggagaggccctccctctccccaccaggcacggggccccacgactggcctcgtccagacccaagcccaggggacaggtgtggagggagcacctgcagatggagtctccctgctccctgcaccttgcctctgagtttgtgcgtggggccagttgccatgtttgcactcccaccccctagtcctggggatcaagctgcctggcagtgtccctggagctcctgggggtggaagagggcccctgctaggtgggatgggccttcgggggcccctgctcctcatggcaccaagcatctgcccacctctggaggttaagcctggcgtgggaggaatgggaggcccccttacccacaggggagatgtttggggtcacagtcacagatgctgggtgggagggggacccaggccttgctgcagagccagacagaagtctccgccatccctgggtgaggcactgggtgggggcctctgagctcctttgaccaccccagctggaactgggaagctgtgggccactgggaggcaagggtccccaccccctctgccacccacatctgtactgtgggcacctccatctggccttccacatcctccccacctccgcatgctgcaggggctgggtggggggtggtctgcagcagactccaaaggaggcgagggtcaagggtcaagaggtggtgagccagctgttcccagatgtgggccgcggcctttcctctttctggaggaatgacaggcctcccgcagaggaggagcgggtggtgacgagggagaaggagcggaaagggaggggttctccacgggttctgttgatttgtttaatcccacgctattcggaggctttcacggatggcggacaagagggagggggagggggtgggggtctcggcccgtgtttcctcccctcctcccgctcccgcccccgccggagccacctgacccgtagcgaagttgccggccccgctgcgcgccggcctttgtgcgcaccgaggcggccgccgggaaccgggagcccgagctggcccggcagcgccgccgcccccaccttcgcgccccttttcactcccccactgtccccggagctggcaaataaacaaatccacaaacaaattatccgtgtgctccggagaggcggcggcgtgggcggcggcggagagaaggcgccgggcaaggcgagactaggcccccgcggagcgggggaagcacagaccccagcccgggcccggcagcagtaagttgacttttatgaaacctacgaagctcgcggggccaccgaaaaggtccccaccggagcggactctgcggggcgggcggggcagaggctgcaggcgggctccccttcccgcgcggctcctaccggccggctccgcccccaagccctggacggcccttcccccagcccgcctggctgggggccgctgcacaccgggggtggaagtggggagccggggaccccgatcgctactcaggactccaagaggggccgggttcttctagggatgtacaaaaatctagggtgacccaagggaagggggcgacccccagccttccaccttacccaccccggcctgccagagagccctccgccaaaggtaaagtgggaaggacgaaggtgctccgccaggtgagggaacaggtctgccaggggcggcgatccaccctgccccaggtggagccggtcctgtacggaaaagagacccaaagaaagatttggggtccccgaagccaaggtaccgatggggggtgctaaggagtctttccccttagaatgggaacaagctccaaggagctggaatcccgaggcgtcctggacccgtccaggaagctaagggtgggggacgggaggggagggggccgggagccggcctccctggccccaacccttggtgagaagagggctgggggtataaagtccgaaagtgaggcggaggtttcagggttccgtttcaacaccatggacagcggatgcctcagactgggagcctaggaccgccctggggactgcccccgtttcattagggtgagggtccgattccgaccactggaggccaagggcaactgtctccaatgaagcggggctgctgcagcctggcctccccagccctccagcccctccagcgtccggcttgcacctgctgaggctgccggcacccgcaggcttggggcagcttccagagctttgcgcttggaacagaaggttccccttgggctgtggaggagtagagggcttgtgcgtgacctgtgagaaagaaagattgtccctgacacttgcgaagggcgaggaattgcggctgggaagggtcaggttgaagccgcaccaaagggggaggggcgtcctgatggttgaggaccggcggagtcggtgcgggcagaaccaacccgagttcctgccgcccttcctaaccggctgtccatgggctgggcagtgctggagagggtggaaaaggaaggaagcaggacctgctcccagggaggcccaggctctgctccgagggcagatggcgcaggggctgggttggccctaggaggaaggagatggggacagaggcctgccggccgcgccggcctgcgctccttgcagtctaaacaaaggccagcgggggaggctccggacggtgaggcttggggaagccactgatccctggccctagagggccagatcgggggcgccccaaggaccctatcgagctggcagtgactgcagtcgggccgtggagtgtcgcctgtgattccgtggtccctacgggcaagagctcccatcccggtctgaaactgtgagaaccgcaagctccgatgggggcggggaaggacgacctttaattcccaccccactgtacggagcccagcagggccatccgcaggaggccggcgggacccttgcctttctcaggactgagaggcttggaggaccgcggtgtgagctgcgcggcagagtgcgttctgcaggcgccagacaggagacgcgaacccgcggtcagggcccgagtgcgggtgcgtgtctgcgggtgccgctgggctgcgtgccggcgaggcgtgcgcgtggcgaggcgtgcgcgtggcggggtgtggctagaggtgtcaatgtgcagctggaggggctgcgcgcgtgggtgcaggagggccatgtgaggggctggagtgtgtgggagacaggcgtttccttgggtctccgtgtggccgccgggcgcagggcacggtcgagggcgctcgatggctgagtccgcgtgagccgaggagcgcgcggggcgggacgcggtgcgaatgcgcgggaggcacgaggcgcgcagtgcgtgtgtgcgcgtgtgcgcggcgcgcgtgccccgcagttctcaaggacacctcggggaggcagcggcggggccggtgtccgggtgacgtcaccgcgcgccccagtgataatcggccggtgccggagcggagcgcggatacgcgcggaggcaacggcgacggcggcggcggcggcgggcgcggggacagttgcatcggggccgggccgggctagcaggagctgggcgcctgcagcgtggaccccgtggacactcggctcgcagccggcctgcggcgctcggggacttgcctggctcccttctcggggttcccgcgcccttctccgcccagggcagcagcgcgcggggcccccgggagccgaagagcaggcgggaactggcggcggcgcgggaggcgcagggagcggaggcggcagcagcggctcccgccgggactggtaattacgctcggggccgggccggggcgagccgggcaagcggcctctctgggtctccccgtctttctctccacgaacagctcgagcgccttctcgcgggcccgctgcgcgcggagaggacgagctcgctgggttgtaaaaagagacgagttttcatctttgagcatcgagattcgttcttttaaccgcattcggtgcgcgctcctgggtcggcacgggcagggcgacggcaggggaaggcagctgcggaggagctcgcgccgcccagtcggagcggttctgcgcccctcggagccccgcgggaggcggccgggtgcgcacgcgctcaccacccccacccccggaatccgtcttcgcgattcccgggcgccccagctccaggaacgcccggagggacgcacttgggggcccactctctgccgcggaaaggggagaagtgtgggctcctccgagtcgggggcggactgggacagcacagtcggctgagcgcagcgcccccgccctgcccgccacgcggcgaagacgcctgagcgttcgcgcccctcgggcgaggaccccacgcaagcccgagccggtcccgaccctggccccgacgctcgccgcccgccccagccctgagggcccctctgcgtgttcacagcggaccttgatttaatgtctatacaattaaggcacgcggtgaatgccaagagaggcgcctccgccgctcctttctcatggaaatggcccgcgagcccgtccggcccagcgcccctcccgcgggaggaaggcgagcccggcccccggcggccattcgcgccgcggacaaatccggcgaacaatgcgcccgcccagagtgcggcccagctgccgggccggggatctggccgcgggacacaaaggggcccgcacgcctctggcgtcgcggggcgggtgggggcggccgagggcggccgaggggggagcctgcggccggggccaggctgcggccagccggcccccggccacgtgtgtccgcagcgcggagcgcccaggcgcccgcagagggcggcggggcccgggagacaaagggagggtccacggggagcggcgggcgggtgcgtggggcggcgggctagggtgcggcgctgtccgcggtgctggcggcggggcggcccccgcgggacgggagggcggccaagtgcggccctcgcccccacagcgggcgccctggacagttgccacggcaacgtgggaggaggtggggcagggtctgaggtcaccgctaagtctgcccttcctcgggccgctgcgccgcggggcggggcggaggcggcgctcgctgtggccccagagcagcccccgcagcccaggaccaggcttgcatggggacgggggtctgcgtccgcgtccagggtccaaacgagggcggtggacacgccggaccgcatcccgcccccaaagccggctctgggctgtgcaggaccaggcacgtgagactccgcagcccagggagaaaatgacaaatccctcccccgccgccatctgcagccgcagtgacacccactcgggtttgctgcaggggttttttttctgtccccggaagccagcgccacctgctgacgcccggcaccgcctctgcgccgcctcccccgcgcccatcccaggccccggctgggctgtgatgccccggtaacagtcagaggacgaccccctccccaaaagcccccttcccctggggcgagtgccagacctggctttgcagctttgcctctttcctcttaaccaggtagaggctgagcctctcctccccggcttcaatccgaggcaggagtctgagtcacctgaagttctcccagctccaggcccaaggcagggagcagaagatcaggataaaaggaaccatttgagtttcaggcagtggcatctccacccccaccaccgccgctgcagggccacaaagggaacctgcctctgcggctgtcctcagcacagacctccagcccctccacccaagtcgcctgctgcagacacaagcaggagccactggtgcctccatcttcccacccccaccccagtcagccaggcagagtcagaacacggtccaccagtctcctcaggggcaggttccccctggagggcacagaagtggcataggcagccccagcaagccccggcctgaccacaacactgaccccggggcttggcgtccccttcttccttcctcccgctgtgaggggacaggcagcatcccccaggggcacttctggtcctagagaaggggaaggggccccaggatcgttccaggacaacaccaaagggactggtgggagtggggtgttccttcggggtacaagatgtggccctagcctagctggagcttcctcttggagctctgacctccagcctggcccttccctcggagggaaggtggcccctggctgctccctcctctggggccagagatgggggctggggctttgttcttgtaccactttccttcctggggaggggacttggctcctagccagaatggaccttccatgtcagtagcctggggagggggacacttgagagctggtgggagcgcatgggcaaactgcccttggcactgtccctagacagtcagtctctgtggggtctcctaggaagagcttcctggactctgtcacggtcagggagctacctctcctgatgcctgcccccagtggtgcacctgggccccagcccccagggcagacttgtggcttctgggctggagctcagggggtcacaggaaggtgggcagcccagtaggtatggggcacacggggggaagctcactgcgaaggagctgcagagctgagtgcgcaccttcttgggccaggccttaccatagctgtagcaccgtctgccgcagtgcggggagggccccatgtgccacagggtccactcggacctgcagcagctgagctgctggcctcagtgagaggcccttggggcaggggccaccatcaccatgctttgcagccaacatggactgccctgcatgtccagctcagcctctcctcctcctgctcacacccgcagccacagtcacagacatgctcacacagtctcacctcccacgcacacacagacactgcccgcctccactcaggaagagctgggcacatacccccaactgaatcctcagcacccagcctgcattgggtcggctgccaggcagtggtcctggtggacagcaaacttgagccaagggcttgggacaccctctgaccagaccatgacacccagcaaggccagctcagggctatccagcagggccctccccagtgtgggaccagaggaagacatcccttccctgacccaaagatttttattctgaataaaacctaataaagctgctgaggctgaagccacaggccccacagtcccctctgaaattcctccaaatcccccggtccacgagcagcagaggtgggaggagctgcaggggccaggccacaatcagcaggggccagggcagccagtccctctattctgcagcccctggtctccaccttgatctcacctccaggtagggctccctgtgtggccattggccaggagcccccaccctccttcccctcaagtccaagccccctggcaggtctctggccagggcagagattaggagctggctctcagcctccctgcccctggctgcctcctggccgtgcccataagccgggctcctggcagtgatgaccccagagttcagaccctcacagcccagccttcacccctggtgcccagaccagctgctattttggggctgtgggtgccaggaacagttggcagctgggtggggtggggcataggggataatgtttgggaatgaattaaaaactaaaaaatgaaatgatacagggtgactccctccagcttattagagggatggagaggccttgcccgacagtgagagcacagagcagagaagtctgcctctgcttggtgaccctgtcccgaggtgccaggaaggtagcagggtcttctcaagtcaccgctagccagggacatgggccagaggcagccctggaatccagcaggcttggcattggtcctgggaccactcatgacatgcacgtgcacacacagacaccctggagccttatgtcctgtggcccccagggctgccacagagccagaaagcaggaccctccctcacgggcaccgccagaaagcaggaccctccctcacgggcaccgccagaaagcaggaccctccctcacatgcaccgccagaaagcaggaccctccctcacatgcaccaccagaaagcaggaccctccctcaaatgcatcgccatagccacactcctccaccctggactctggcctggcctgacggaggctgctggttattcaccagatggaggcccaggctccatgtcttcagccaccgtgccctgccccagcatcaagttccctccgcactctatttcctccttggtagaggggaaaaataaagccagtgtctcccacggttgcctcggggtaaccggtggcaacaccatgaatgagatcaagaagaggctctccaggggaagctgaggccagggtggggcccagcccggggctggggatgtgtttcagggggagcacggccaggcacccgcccccctccccccgcccctccttgccatcctcatccctgcagggctgagacacgcaggtcattccggctccttttctggaactcagcatcagccaagccatgatcgccacagagatggccacacccctcctcttctcagctttgcaacccccaccccagctggccaggccagatcccagaaggcagccctcaccacccagaagactcacagcaggaatacagggatacaggggcggaaataggccctagtgctggggaacaggactgtttcaggggagactcccccaccacaagccatttccacagatgctctgatggagccatggggttgggggccagctcaaagccgagggcagctgagccccctcctcagggccatgagtggtaaaactgagccagatggaaacatacagcccctctgcatcctcagcagatctcagcagacctggtcgggttgctcctgagatgctgtggcctctgcagctccttcattccctggctccccagccccgagtcactgccagctgggaacatgggccagaggcgccccagaatccagtgggccgggcattccagcctggtccgggggccgctctgccacacaagtttatgccaccacctctgaacacttgggaggcatgtgggctgggctagggcacagccactctggaccctcctgctgagagccccagctgagacacagacccttggccaaccccaggaatgtccagccctgtgagcaggatctgagccccacacgaacaaacgaccaagaccaggctggggaccaggcttccaggcccaggctgcacccagtccacacacacagcacatagggtcagtgctccatagtgggcacgtctctgcagggacaggatggagatgtccacgcagcacacagaccaagctgaggtaaagtctcaaagtacaaccatgtggcacacaaccatccacctaggggcacaggcagaactccccaacacacctcttggctacctcggtatgtgtggccaggccctcctgcaggtgcctgtacttaccacgtgagggcgccctggagctgccacaggatcctgcacctggacaggaatggggagacccctggcagaatcaggccccagaaggacctggagcattgcacagacacgaatgccgtctgcatgagcaatgtgtagaggcaggcccctccccacggggagactgccctttgccccacacacctcagaccaggggaggagggacacacgggggcccttgcacatcaggatgctctttgttcattcattcgttcattcaacagatatttctgagcccttcctaggaatggtgccacaagcaccaccaaggtccaggtgggcctgcagggacaggacctccatgggtagagagggtagtctgggctctgcctggaacccacctggaacagagtctggaacagagcgggagcatcctggtcacagtgggtgggaaggcggggccccctcagccattggtacaaggacacaagggcatgtctcagactcctggagtcaagacttcaccgctctgtgcttcccttctggaagctggagggtaagtttagacatgttcgttcagtaaatgtcagcggtcatcatcaccataattactgccaccatcagtaccatcaccaccattatcatcagtaacatcaccaccatcaacataaccattgccaccatcatcattgttatcatcagtagcagcagtggcaggagcaccatcaccatggaccctgcagagtggggccatttaaactccctctggctggtcctgttttcagttctttgaagcagtggggatgtgggagagatgcagatccactgaactgtggccacccaaaggtcactccatagacccatatacttctaggagggtgactgcatgctgaggacacaggaggggaagctacagggcctcagtgccatatcagcctggtgatgctcaggtccccgactccacataaggacagccctcctctggccacagaggccctggtcatcaccacctaagcagcccctgaaccagctaaccttggacagtctccagtgtcccttccccacaagtcttcccaaatgtctagagaatacccctgtcttggcccccaaaaggtatttccgtgacttcacacccagagaagtgcagaatctgctgggggcaggtagtcctgcttagaagacatagtggctaccctgggagagtggcaccccctgtcagagcccacctgccaaaaggctggagatgtcccaagagcctaaggaccaaacagcccacagaaaagcccatttccagccaaaccccacctttcctcatgtgcagaccccccaagaattacagacctgaggaggtgctgtggcttgcacccagacagagcagaaggcggatccttcccaaggggctcctgtttatctgggaccattatcatctttacattagttttacacggcccatgtgtgtgcacctgtgtgtggctgtatgcatatgtgcatgtgtgtattcatttgtgtgcgtgtgtgcgtgcatgcctggggatgcctgtgggcatatggtcatgcgtgtcagtgtgtgcccatggtagggcatatgatcatgtgtgtttgtgcattcctatggtaaggcacatgatcgtgtgtgtcggtgcacgtccatggtagggcacatgatcacgtgtgtcggtgtgtgcccatgttagggcatatgatcgcgtgtgtcagtgtgtgtccatggtagggcacatgatcacacatgttcggtgcatgcccattttagggcatatgaccatgcatgtctgtgcgtccccatgttagggcatatgatcacacgtgtctatgcctgctcatgttagggcatataatcacgtgtgtcagtgtgtgcccatggtagggcatatgatcacgtgtctgtgtatccccatggaaggacacatggtcatacatgtcggtgcatccccatgttagggcacatgatcacgtgtgtcggtgtgtgcccatggtagggcatatgatcacgtgtgtcggtgtgtgcccgttatggcatatgatcatgtgtgtcagtgtgtgtccatggtagggcatatgatcatgtgtgtctgtgcattcctatggtaaggcacatgatcgtgtgtgtcggtgcgtgtccatggtagggcacacgatcacgtgtgtcagtgtgtgcccatgttagggcatgtgatcacacgtatcagtgcgtgcccatggtagggcatatgatcgcgtgtgtcagtgtgtgtccatggtagggcacatgatcacacatgttcggcacatgcccattttagggcatatgaccatgcatgtctatgcgtccccatgttagggcatatgatcacacgtgtctatgcctgctcatgttagggcatatgatcacgtgtgtcggtgtgtgcctatggtaggcacatgatcaagcgtgtcggcatgtgcccatggtagggcatatgatcatgtgtctgtgtatccccatggaaggacacatgctcatacatgtcggtgcatccccatgttagggcacatgatcacgtgtgtcggtgcgtgcccacggtagggcatatgatcacgcatatctgtacgtgcccatgttagggcatatgatcacacgtgtctatgcctgctcatgttagggcatataatcacatgtgtcggtgtgtgcccatggaaggacacatgatcatacatgtcggtgcatccccatgttagggcacatgatcacgtgtgtcagtgcacgcccatgttagggcatatgatcacacgtgtctgtgtgcccatgacaggcatgtgtgttgtatgcacgtgtttgttgtatgttctctgtacatgtgtgcatgtatgtgcctgtgtgcacccagatgctcatgcatgtatgtgtgcttttgtgtgcacctgtgcatttgtgtgtgggggagtgctgaggtacagagagcagctccaaggtaggaaagaaccaccctgggccctccggactcccagaatgctcaggccctcctgcctggcagtctttgcccatgaggatgttccggctggaaggctcttctcatgctcccacatccctttcccaactcatccttcaggtcccaacttggtctgtctcagagaccaccatgtgcgtcaaagctctggcactcctggggcatgggctccccttggcctccacttcccaaagccgccccactctcaagtccctcaccagccactaggggtggtgactggcaaggagaggccagacagggattagtcaccgggtgcggctagtccacctccttctccaaccaggatccaccctcccaggccaggcaggtcctcctccaccccattctgacatctgcttggtggcatccctccccagatagcagcctgaggacctgtggagggggcaagagcagagcagagcaggctctacactgcctcatgcagggacccccggctgagtgtggcccagagtggtcagcccccaacatcagctgctccccatatggccctggggccaagacaccctcagggatgtcttccatcccaggaaggccaggtgggacaatttgccttccgggcaacacacattcctgcctcccagtaccctgtgtcccctgggcctccacccactgtgtagcacaagcatgtgtcaacagaaccctgtggccaggcccctgagtgtcaggaagtcccctagaagactgagctgcctgcccctggctcacagagaggtggggggcaaatgggggtctgcttggagcagggcagtggcagagagaaggaccagccccgaggggcttgggcatggcagggattgggcctgccctccaggtctctctggacactcttaccccagcccctggcctcctcaatgccacacttaaccaagtccccctcagaccacaaccccatgccctcgcctgctcctgaccctcagacacaggtgcccagctgccaatgctgttcccgcctcctgaaccccaaagtcccctcacctcctgccctgccctgacttgatgtggcctcacatcccagcctctgctctctctcccgtgctgtgcctgccccacccccacctcctgcaccccaaagtcctctcacctcctgccctgatgtaggctcacatcccagcctctgcagtctctccagtgctgtgtctgccatcaccctgccacctgcctccccgcctgttggacaacaagcaactgtgcttgttggggagactgcagacttcaggccccaccccagggctcagcagcctccagcctggccctcacacacccccacctccttgggaaaggctccaggacacatacggtccacaccagcctcctcctctgagctgccgtggccagccgtccttggcctcagatcatgttctgtcagtcctggtcccctggccccactcccttgaaggcagccagtgaccagagccccagaaggttcagttgcaggttccaagtgaatttagggatggggagactggggaggccctgctggagctgcataaaggcactttcagtgactgggggcctccatgctggccatggtgctgcctgtacttcatgcagcccagggtcctgcactctgggccctttcctgggggaggaaagaaacccagacatcagccctggggaggtggaaggaccccaaaaggggctgagccccagccactagccactcaccgatccaccggtgagcggggctggaaatcggcctccggcgggatcgtctcaggctcaggcacgaagcacaggggccctgtcgtaagtggaacctccatctgcagcaggtgctgggtgtggagaagccagtctcccgagggtggggcagggggtacggatggctgtcactcagaaggacttcccacccgggatggtcagtctcacaaacgacaaggagactaccctaggcttacacagaccccagggggcagggcccctcagtgcctctcaggaaggcagaaggggctgtggtcctggcccagttcctgggactcctgcctcaggctgcaggcactccctttactctgtgcacttgcagggatgaaacccacctccaactccacggactctactgcccagggcttccccagccacaaaggagagcttgtgcctgggacagcgaccacccccaggacagaaacaccccctcccgggactcctctaggacccactgtcccatgtgggaccgttccacaggtgctactcttccagggcgcaaatcccagcgtgctcctggccacacccacatcccaaagctctccggctgtccccaggcctgcagtctgctgcaccgtgctcccacagtggggcccacttccctgctccgccaggctgctccacacagccctggcaccccttgccccctgcccacacccctccaacctcgtacacaggcagaggccccgcccagcctccacccaagcacacccccggcctggtccacctgcaaaaccaaacctgctggactcgtcatttcccccaaccagcctggcttctccatgaacaacccccccaagttggggactgctctccttggtgatgacaagggtcccccactggtgtggcccctccagaccttgccacgacctcagtgacccccccattgtctccccatcctgcaacttgggatgttgaggcttttaagttgtcaaactagaacaactcgagatgaggacctcggcaggggggctggtgacaggaggatggatcgccaggaggatgatcgccaggaggatggatggcccagagctcagaagaggtggttgagggcccagccccaggggacccagcaggaagaagccagacaacttctgaggctcccactgaacccagaccccaccaggctgaggggcttgcacctgcggaggaggagggaggagtcaccctctgcagtaggcaggggagaggggtggagagcagtggctttgcatcctcctgttcttgcccagggctcccaaaacaaatgccaccccagcacacaaaccacacaggcacacagacacacatgcacacacaccacacaggcacacacctgtgcacaacacaccacagacataccacacaggcacacacacaggcacacacgtgcacacaccacacgggcacacacaggcaaacacaattgcacacacgttctcacacagacacacacgggcatacatacatgtatctacacatatacacgcatgcacataagcatcacagtacatgcacaaacatgcaatacacatgcagacacatacacagcaaccaaatgatcaaggaaagggatcaaaatattaacaataagtgaatctgggtgaagagtattctctatactatgcttactcttgcaatttttctgtatatttgactttatttccaaagtaagttttttaaaaaaggaatgccgtcacctcaccagccaccaccccataccaccccctcgaatacacctcaagcagctcttcttgatgttgggaccagagtccctctctcaccgctcctctgcagggatgcagtgtccccagctagtgaagacagacacctgtgcccccaccccagccccaagctgctgcttgtccctgcacctccaggtgctcacgcccagccccagggtgcagcaagcttcccaaaatataagggggagggggaagggaggccatcccatccctgaggcctggcagagcaagttggcctagggacctggtattctgaggccccgtcaaggccaccctcctgcacacctgtacccagactgaggaatgacctcacctgccacctgccaccatctttggagaaggctagggctacgttagcccagcttggacgagcccaagcagcaaactgcaccttgaggtctcctcccgtgatgagaacatcacggcagaagccggcacttgggggaggcaggggaaccatgacaccagctctggacgtcccctcctgtctgggctggacaccgaacccaggcacttctcaccccgaagcacaccattgcccacccctgtgccctggaccctccacagggccaagcgggggacgctgtcccagagaacctggagcctccacagggccaagcgggggacgctgtcccagagaacctggagcctccacagggccaagcgggggacgctgtcccagagaacctggaccctccacagggccaagcgggggatgctgttccagagaaacagctgctgcccacccacagaaagtctcctcttccaagcctgacagttccacaggactgaggcaacactcttcctggtctcacaagtggtggccaaagcccaaagccgccaagggcctcatcacctgtgcaccacctactccactcccgtcccctcggaagctgccctggggctgcccagcctgcaggggcccagccctgtccgtggcagcatgtcaaggctgccctcggccctgaaggagacccttcctaccccacagcttctcctggcaccaagcagtggcgctgcggtgtccgagctccccgtctgcccataggagccccgccatcacccacgggaagcagcactgcaatctccgagcctcaccctccgcaggacaccaggagcgtcagcatgctgccatccacagagccccgtgacgggcaagtgctgggctatggcttcccatagcttaggaccgacttcgggcggctcgccctctccacggccacagagctcggaggagtgcccaagaggcgcctctgtccaggatacactggaggcccctgtgcccaagctctgcccagacattagcagttgctggtccttctttgactctgggtggccaggacacttgcgggagggagggtgctggccccaaacaaccccacaggccgtgtggactccccaaaggcaaaggggccctgtggcagacctgtcctgagataggagcctcagccctgggccacagcaggaagccagcaggtctggtgggcacccctggaactcactggagttgaggcctggtcctgatgctcattccgacacctgaagcctgattagcttggcaagtctagctccctcttgcacgagctgagcgacgcagcagggcgaggcctggcccgtgcccaacgctgacgcttccgcctggtccagctggtgacaacgtatgagacacctaggcctgtggccggctgccaggaaaggagggaacctagactgctgttcaccatctgaataccccgtgacttaccagcaagcaggccactctctcacacctccaccagggtcgcctcccagataatccttctcagtcataaggaggaactcttgagaagagaccttccagggaggagcctggtggctcgaggagcctctgaaccgggcttttttttgctgtttcttttttttttgagacggagtttcactcttgttgcccaggctggagtgccatggcgcgatctcagctcactgcaacctctgcctccctggttcaagaaattctcctgcctcagcctcccaagtagctgggattacaggtatgcgttaccacgctcggctaatttttttgtattttagtagagacggggtttctccatgttggtcaggctggtctcaaacttctgacctcaggtgattcgcccgcctcggcctcccaaagtgcagggattacaggcgtgagccaccgcacacggctttctcttcttatcattaagcactatgaaggaataagcgagccttttttttttttttttttttttttgagacagagccttgctctgtcacccaggttggagtgcagtggcatgatctcgggtcactgcaacccccgcctcccgggttgatgccattctcctgcctcagcctcccgagtagctgggactacaggtgcctgccaacacatccggctaattttttgtatttttagtagagacggggtttcaccgtgttagccaggatggtctcgatctcctgacctcgtgatctgcccaccttggcctctcaaagtgctgggattacaggcgtgacccaccgcgcccggctgaggcgcttcttttttatttttttttttgagacggagtctcgctctgtcacccaggctggagtgcagtggcacgatctccgctcactgcaagctccgcctcccgggttcacgccattcccctgcctcagcctcccgagtagctgggactacaggcgcccaccaccacgcccggctaaatttttgtatttttagtagagagggggtttcaccatgttagccaggatggtctcaatctcctgacctcgtgatccgcctgtcttggcctcccaaagtgctgggattacaagcgtgagccaccgcgcccggcccaggcgcttcttttaactccagatgtgtgcacccgaaagttagccacagttacgtgatggagcaactccaggctgcagggaaacgtgagcgccggccgtggggatgcgcggggaggagggcgggccaccaatgcctcgcccacactgtgtggagtccacaggatggagacggatactgagggaagccatgagttgtggtctggtgactgaagtcacagagtaacggggctgccccaagctgggagccaaggtgcggactcctttctcacgggcctcctatggtgagatcacagcagaagccggcctgggcttacagctggtctccggccagagagggcatttctgtcctaccaaagactgcaacaattctggacagcgaggggcctggagggacaggattcagcccaaagtaccacaggccacacgtttcctccatgtcatcccctagcctggccatttaagacccaatgcagacagcaacctgcagagccagcctgtaacccaccagaagcccagagcacacttgggcttgcacctgagctaccacccagcccctccaaggaaacttctacaggcagaggcacctcaaactgtaaatccagctgaaggcttttccaatagcttgcaatttattatgacatttaagaattctagcataggccaggtgcacgggctcacgcctgtaatcccagtactttgggaggccgagacgggtgggttacctgaggtcaggagttcgagatcagcctggccgacatggtgaaaccccatctctactaaaaatacaaaaattagccgggtgtggtggcacgtgcctgtaatcccagctacctgggaggctaaggcaggagaatcacttgaaaccgggaggcggaggttacactgagctgaggttgcactccagcactccaccatgggtgacaagagcaaaactccatctcaaaaaaaaaaagaaaagagaattctagcatggtgggctttggggaggggaagagggaaaaaggaatagggctcatgtggctggcttttagggaggcaggtgtgagaaatactaacaacttacagctctttataaagcaaaatgagatgaaatccctcccccgcccccccaattctcactccacaaacctatgcctttcggttctcccttcccctggtaggcctggctccttgcctggcattaccatgcaccacgaatgcaggcaggaggccccaaacacccagacacggtgtcagttctacaaaactttccaagttggcagaaggagaagccactgcctcctccggtttggaggcctcaggggaggtgttgtctagaccgcccaatccactatccattcacaagccagtcagcaactaccacttgccagagtccctgccaccacctcccactctgtggggacaacagcatccacttcttccacaacaacgaaacaacaaagataaagcatggcacctgtcgtcatgcttgccacctttcagcacctctcggctcagcattctgaaagccgggaactcatctttaaaggaggccaggacttgaatacaagcaagaaaatggcataaaatgaaggaattagccactcgaggttgaaaacacacttccctaaaatgacagcagcatttggagctgcaggtgggagcacacagcctacctctaactggcctgtcagaacagacacgttttcccgttctcattttgtgtttccttaaaccaactactaacttctggcagaggtggtgactgcctgggaaagatgccatcctcatctggcccccttatctatcaagatgcaaactaataaaaccagcgggcgggacacccatttaacctgaaacctcctcttttgttaaaaatggactgaatgtgtcttccggttaataataaactttgctgggcactggaataaccaccagcctcctcaaccgtggctgctctcaaaagcagatgtggtgttccctgtcccgagaaggctccagagtatttggattaaggacctggatatgcagatcctactcttaagaattaacatttcctccctacccctcaaatgtaaaactggaaaaattaagaactctgtattttgcattgcattctcttaaaaattctgttaaaaaaatctcttcacagactgggtgtggtggctcgtgcctgtaatcctagtactttgggaggccaaggcgggcggattgcctgagctcaggattttctgggctgaggctaatattgcataactttatcacatacttgtcaacttctgcagatgtacacaatgtgcatttcactgcttataaattttacctcaaaaggaaaacaaactaaacaggtattaaactcttattgcataaataataagaggcattggaggatgaatggagagagacggtgaggagccaagtccagaaagggggtagcggtgcccaggtgctgcacgcaccgctgcgtctgcacattcatgtgatgaggggtgggtgacggtgccatgtagtttatagtcttaaggaaattaacagctccctcttccaaagcgagggaacgagaatcccacaccttgagaaacacagggctttctacggtgactccccgaatggctctgcagcttaaaaagctccaacacataaactcatcaagtagggtgaagaatgaggtgacaccaagtttgctaaatagtattgtttattaaggcttgtattctcctagaggaaaaacccaatgtcgtccaggactccattcaggcagtaacagttcagaggaagtgacacgctctaaatacaagtctaatgatacagctgaaacgttaactcagagggtcttttggagcaagtagttttcagaaagcgtctgctctctaggacggtaaggatcctctacaagggcacgtgcagatccaggcgctggagcgtcaggcatgggcaccattttcatgcttcaactcaaactccaggtggtagtgagctcaacggtccctcattccacaaaacatgacagcaaattcatcttctaaaaaaagttttgttttgtttttacccattcaacaggaaaaaaaattagacacacacgatgaaatttacaaccagcagcatcatccatcacactgtctgtactaccagatcctacacttaaagctcagcattattggtataaaaacttaagacggcattagaattcttaagaaaaggtgtaaaatttaaaaagatgtgcaaacaacaaagaatgcccgaccctgaaccagacctaaagcaccttccagttcctccacacatcatgccccaacaccatccagcccaatcggacaccaggacagtgagggacgggtggctgttcagtgggcaacagatctggaaggaaagattttcaaaaaaaaaaaaaaagtgtctgccaaatttgaaaaattaaaagttatctgtctagcagaaaaatcaaatgggtaaattagcactttagaccgataacagataataaaatgacaaatcagaatgaacaaaaaatcattaaccttttgatttcagtattttcaagagattttatcagaatactctaaatgacaaaatgactcatggtttcttatgtttgctaaaaagcaataaagggatgagaaatatgaagtctcacagaatatcaaatgactgaatttaagaacacaatttctgccaaaatagatgctttgtttttaaggatacttacatttcacattagatcagtctgattgataagctgacaaaaaaaatactcctttattagtgacttctacaggattataatacatagaaaaagtacaaataaatgcagatccatctgggcaaaaatcaacgacaagaaaggcaaagatgcaacactcaacccccgcacgggacgacacactggagctgaccaagcacacgtgttttaaactgttttcaaagtcaaacgttagaacatgtaagaaactggttcgccctcattgtttgtttcgactctgccgttcctgtaaaaagaaaaaacaaaagttgaacgcagagtaaccacaccaatgaatccctcccaaaagtgagatccgaggctgccccttagcagcacctgcaaatctggaggcgggaccctgaatggtacccaagccacaccagcacacaactctgagctgcactggggcctgctctgtgggggactggccacactgggcatggcattctccccaccccctctaccaggagaaaagcatcaaccacaacggtcacatgggccacctgtctgctgggaagcctcacttcccacagctgtctttccctcatgtgccactatcattccacatggaaagacacttagcaatgtgaaattctctgcactcagagggaggagctggcacgcaccaggctctcaaggaggccagggagacagaagctgttcttctgtattttatctcatttaaacttctcagtggcacaaaggacaccaaaatccttccaactggctaacaaggtgctgtgtcatgtggctaatgaagggcaggaggaccggtgtgggcctgtccagttcaggcccttcccactccccagctcactcccacgccaaggggaagagcatgcccctccccactcccccacggctagactggctcaaggcaaagctcctctgaccaggtttgctgcccactcccgtaagagaatcatcttttccagagtgtatgtgacacacaagcttgagacttacacccgaatcttttcccacactggcctccctgagtagcagggtctagaagccccttcagtctccttacaaggcagcatacaaagatgaaaatgtgcgatctaaggagcacacgctgcaccactctgctagagaggtgtcccaggccgagtgtggtggcgcaccctgtaatcccagctattcgggaggctgaggcgagaggatcgcttgagcccatgagttttcggctgcagtgagctattatctgccctgcactccagcctgggcaacagagagagaccctatctcgaaataaaaacaaaacaaaaagatgcatcccaggcacatccaccctcatctggccatctatcaagatgcaaactaataaagaaaaccagcgggcaggacacccaaacatttaacctgaaacctcctcttttgctaaaaatggactgaatgtgtcttccggttaataataaactttgctgggcactggaataaacaccagcctcctcaactgtggctgctctcagaagcagatgtggtgttccctgtcccgagaaggctccagagtatttggattaaggacctggataggcaggtcctactcttaagaattaacatttcctccctaccctcaaatgtaaaactggaaaaattaagaactctgtattttacattctcttaaacattctccgttaaaaaaaatctcttcccaggctgggtgtggtggctcatgcctgtaatcctagcactttgggaggccaaggtgggtggattgcctgagctcaggaatttgagaccagcttggtcaacatggtaaaaccccacctctactaaaaatacaaaaaaaaaaaaaaaatttggcagggcatggtgaccggcgcctgtaatcccagccactctgaaggctgaggcacaagaattacttgaacctaggacgcagaggttgcagtgagctgagattgtgccacttcactccagcctgggggagacagcgaaactctcaatcaatcaatctcttaacaaaagaggtactgctgttcctaaaaagcaaataccaatctcttgagttcaaatagctgatgttaaagccactcacaggtaaactccccagatccccatctcccttcagcccttataaacagctacaaagtttactatgtgctctttaaaaaatactattcctcataaaatttctcaaaaaaaaaaaaaatgacgaagcacagctcgttcttttgaggaatgctcaacaagcatccaggaaatgcttatggcctaagattctctatgctctttcttaatttccaaagtcaaagagccactctgctgagccggcctggaggtcgaagtggggtcaggtcaggggcacctgccgccagggcaaggacagtcagtctgaggaactaagcaatgctcacagtgtgggacgctcaccactttcactgttttaagctaagaagtggccgtttctaggtttttttaaaaccaaaaaatgtatcaacccaggacttggtctgactctgctgccataaaagctactgccatcctaagaaatcagtatgtttctaaatttatagctggacagcaatcttgcaaaatgctaactctacttcactttctcaacactcaacttgtttatgacctttacagcaatggggccaaactctaaatgataaagaaaaggtgggtctgttcttcgaagtcctgagagaaccttgagaaaaccgcccgggggctctaccagcacaggcgcacaaccctctcctcggcacactactttgttcttaaaactgcactgactcggccgggcgcagtggctcacgcctgtaatcccagcactttgggaggccaaagcgggcggatcacgaggtcaggagatcgagaccatcctggctaacacggtgaaaccccatctctactaaaagcacaaaaaattcgctgggcgtggtggcaagggcctgtagtcccagctacccgggaggctgaggcaggagaattgtgtgaacccaggaggcagagcttgcagtgagccgagatcacaccactacactccagactgggcaacagtgcaagattctgtcttaaaaaaaaaaaaaacaaaacaaaactgcactgactcttcatgggaaacccagagggagaaagcattagacacccagagtctcagcctcaagacacctaagactccaatcctggatgagccactagcccagcccgttaagcacaaggcctagagcaccttcgcaggcagggagagccagcagcgaagtccagtctggggacctcctcaaggaccacttccatttctctacactgcccaataagcttaaaagatatttgacgccgggcacagtggctcattcctataatcccagcactttgtgaagccaaggtgggaagactgtttgagcccaggagttcaagaccagcctgggcaacatagcaagacactgattctacaaaaaaatacaaaaattagccaggcgtggtggtgcacgcctgtagctactcaggaggctgaggcaggaagaccgcttgagcccaggaggtcaaggctacaacaagctgtgattaagtcactgcactccagcccggcagacggagaaagacctgtctcaaaaacaaaaacaaaaagctatttgaggcggggcacggtggctcacacctgtaatcccagcactttgggaggctgaggtgggcagatcacttgaggtcaagagatcgagaccagcctggccaacatggtgaaaccctatctctactaaaaatacaaaatttagctgggtgcagtggtgggcgcctatgatcccagctacttgggaggctgaggcaggaaaatggcctgaacctcggaggttgaggttgcagtgagccaaaattgcactactgcactccagcctggctgacggtgagattggctcaaaaaaaaaaaagctatttgaaattccaccaaacattaacaaaccaggttctcatttgtcactttcaataaaatgaattaatgttaacactgacccatatgggcccagagttctccagcttggctaacagtttaggggagggttaccaagttccttccaatgatgctccaccagcggctctgttggactcgccttggagcacccagtggtttgaggaacacttggatcttgcctgcaggcagatgcccacagaccctgcaggccgcttaccaagatgcttaacccataacccgacacacaaaagcagttatctagatcaagtttttataatgcaagttgtaggacactagagttttaaaaacaccaaccaggtcaggagtccgcacactttatgaaaacccaagtattacggtatttaagaagaaaaactgtgcgcgcacacacacacagccagcttccagtttagccagctaaggacctaaagcttcattagcaattatccctgcaactttagcaattcagtattcattttatacctaaaagtctgtaatccgagctattgtctgtaatcccagctacctggaaggctaaggcaggacaatcactcgaacccaggaggtggaggttgcagtgagccgagattgcgccactgcactccagcctgggcaacagagcaaaactccatttaaaaaaaaaaaaaagacctaaaacacagaatttcagtaactaattcagaattcagtaactggaaataaatgacatccacttcttttctcacaaaagagagggactgatacttttccaaagttctacaagccccaagttgttcaggacttgcataatgtaagactgcagacagtgcaggcggctctactctatacatccctatatatgccatgtacacgcctttctgcccaaaatacattaggacacttggtgctcacaggtgaataattcctttaacatagagaactgaaaaaaacactgaaaacccatctattatcaactgacatttcaggaagggatattttttaaaaagcaggagagaatctcaggatgaactctctcgaataaaggaagcattatgaagtatgtcagcatcatcattttcccattgctggtgccagtttacgggcatctgagcccttctgaagagcaaacacactcaatcccgtcagacatcacatgacagcacagactcaggagtttggctacaagtatcccaggaaatcaggactgtctcaaaaaggcccagtcaatgaatttttgatataggatccatatttgtcattataaaatgtctggattccaaacctaccccaccaccaccattttctttacgacctagatggagtgagtttgtttccaaaaactgcaggatactgggtttttaaaagaaaaataaagcaacgacctccagatcaaagaccagagattcccaactactgagggacagtgccctgggaagcaagggcccttggccaggtggggtctcgatgccctacgtgcccaccgcagtgcttcgtgaatatcacctaagtgttcctcatggacggaggctgggaagcactgttccagaaagtatcacaattcaaaaaggagaggagaaagttaccctcaaattctttgtaacagaaaaacagaatgtgtacactgtggtcccaattattcaattataattggaaagtgatcaaagtcgttcggtgacatctacccaaataccatcactggttactagcagtactctccgcagggaaagcccacgaggctgccaggacctgggcccgcccacctgcggccaactgggagctgcctgtcacgagactcagctcggcggacctgccgcatctgctcaccaccgggccacctggtctaagtacggcaccaaggacacatctgcatggcagttgcctgcaacacccagcctcaccttgcgcaccacctcctcctcctcctggcgcttctcgtagtgagcaaagtcgtcgaagatggaggttgtgtgcttgtaggaactgataattttcagcacttgcttggctttttctaagggcacctcctgggtgtcccgggagtttgtgaccggtttgttgtcgttattctccagcctgatgtgccggagctggttattgggtacatccttaacaaaaatccactggacatcaaacttccccttccacttgtcctgagaccagaccccggcactggtgccgtagtccacgggggacttcatctcggccaccccacaaaaatgcccactcccattgacgctgaagagcaggtagacgggccccttgctgctcatgcagcggaaggcgctgtccaggcgcttgttgccgtgctctgtgctacaccagatggagtacttaatggagcggtggatgtcgtcctcagagtagctcttgatgatgaacacacgcccgcttttcagattccactcaaactctttcgggttgtagctgtgagcagccttcagtttttcaaggacggggtgggattcgacgctgggggcagaattaggctggacgtttccaggagagttgctatcgctgccagcccctccgctctgcccaaacgccgcgtttctgttgcgtggggcaacccagcgggtctggggtggctgctgagggctctgatactgcggttgagccaaagctgggggctgtgctgggagaggctgagccacctgctggggctgtggggcagcctgtggagagggtgcctgctgggggactggggccttcggcacaggccccttgttatcccaggtgccaatgtccatgttatgctttatgggtggagggggcagcccaccccccatgacaggcccgctctttgttttcattttaggctgtggttttgcaggcttgctggcaatggcagcccacgaggtcggctttgaaactggcatgttcacatttgtcccaccgttgccagaaaggacaccagtcagtgccacgctgctgacgacagagcccaccgtcttgacggcggaggagctgacgtccccaatcttcaggccaaccatgccctgctccaggctgttcatcccgggggccttgctgagggtgtcgctgtgaaagcctggctgcccatcaaccaccgtgccacccagggagctcggggggtaggtgtagctgctcccatacgcggagctctgggtctgctgaccttgagacccacttgtcccccatgctgagaacgcagggttttcagggaaaaaattgaacctgtgctgatagatgttgttccccaggcccccaggctgcccaaaaacagcatcgtgcataaaatgatggtctccgttactgagctgtccgtaggtggtgaggtatggaatcggagggtcccctgcagtagaccacggagcctcattgagggagtaaggaaatccaatggacggcgggtaatagctggacaggtaggggtcgctcattgaggggtaactgttactctgcaaaagcaaacgtgacaagttacaccacttctacaacacgagatgctgagaatgccaaccgcctcttgcttaagcacaggtggagcaaaaacaaaacctgcacagcatggggctactccttccagaaagaaagctgtagtcgccaatgtgagaaccaaatcaagacagagaaattaataacgaacacaaaccagggtgccgtctcaaaatacgaagcatcattggcaaggctctgaattcaggctaaatgacgaagctatgcctctctagaactggcaaggtagcagccccctctactcttacctgcaaaggaatccagaggtagaggagtaaacccctgcctgctgacgacaacgcttatgacagacacggacggcatcatgggaactgaaacagctttgtaaggcagagatatttccattggcaaaccaggatgtgcagggccgtgaggcagtttgctccagagaacagaccccaagctcgctgattactcagcaggccctgggcgcccacctctgggccttgacattcctcctgggacactctcccatacctggaccaaagctctcccagaatccttcaagggtgcttcagaggctccttccacacacccttcctagcagatggcccctgcctctaagtccaagggggttcacattcccatgatttcctgggcacagcgttgggctcttgcagtaggcccctgcacagagggccctggctggctccagctcctcagccaagagaaagcatccgaagtgtggactctgtgctccgggtgcagagcagccctcactctggatgccaactcacctgggcttccttatgaaaacatgtctgtgtagtgactggaacctcagagagtggttttaaagtgacggaaccatgaggcaaaaaggtctgctagagaaggtgagtgcctgagtgccccatcgtaggggtctctgaagagctgcccagggcacaaatttagactgagggtcagcagttctgggacggcatctccttggagagactcaactaagggtctggtcatgattgggtccctccaacactgccttaaaatgactttcgtgtgaggtgtgtctgtatgtgtgtgcgcacacacacctgtacacaggccggtgagacggggtccagtgtgaggtaagaaggctcccacctagacgcatcgtctgagagtgccaagatgctattacagaaaacagagccggaagtaaaacacggggctctccagtctgtgacgcccgtttttggatttttagttttcccgctccccgccccccagtcccccaagtaaccagaaggttctacataaagagaatatgctccagacctcatctcacaacctcatccctgccacattgacctttcatgttggcatcaaaggctacactatgaaggataacagcacccagtcggggacaccaggtgggaaagtagctgaggcaatgagggagactgtgggatcccagacaatgaaacaggcctgcttcactggaggggtgaccacaagcagctctccctgggggcagtgccccaacaccagccaacactggtggactaatgaaccaatgacccggccaccacttcctgcctcctgctcccatcctagaatactgagggcttcagaaatccaatttattttctaattttcttcctgttgacttctccacttgtgagcagacaattccagaaccccccccttttttttttgggacgaagtctcactttgtcgcccaggctgcagtgcagtggcacgatctcagctcactgcaacctccgcctcccaggttcaagcgattctcatgcctcagcctcccaagtagctgggattacagacacccaccaccacacccggttaatttttgtatttttagtagagacaggatttcatcatctttgccaggctggtctcgaactcccaacctcaggtgatccacccgcctcggcctcccaaagtgctggaattacaggcatgagccacagcgcctggccccagaatcatcttttaaaatgcactaactgctgtttccccgtaatataaatttgagattctgggggtataagaagacaagtgggatgctatcagtgttccacaaacatgagattaatctgagcttattctccctcaaaacagtttccatgatgctggctcctttgctgcagcctttccctcgggtgctgccctggccaacaggcccagactgggggggtgagcgaatcaggggggcggtctgtgcacaggacttgctcctcgagtcactggccgcaggtgccttcaaggacggcaggcaaggggacagtcccccccacagggaagccagccctcctcctcccattagctggacacgtgctcctcagcagcgctgcaatcacaacacatcttccttccacgcaaaaagagcagatgggaaaaaaagacctcgatggctgtgtggtattctaatccacttggccccaacaccaaccagaggagtcaggccacagaaacagatgcccagggacacttctgacttacacctaaagccttaactaagacaggacatcacttaccacatgaaaaaatccacattacatgaggcatgtaacattcctgaaaatccgttttaagtattaaatggacacacctagcacacacgctgcacagacagagagcccataaatgacccatccagcttccctctacccaaggtgcagggcctgcagttctagccagtactctgcaaatccttcagctccagatcaccaccattcacatcctgagccacagaagacggtgacgctaatcagctctgctggcagccctaaaccctcctgatactttctgtgctcaccgggttccacggccacacaggcaggctggatacagtgacctggggttctgtgggccggatttccatttttacctcaatctcactgacagcccatttcctattacatctgccatctttcctccaaaactctgaaggtaaagaagcaggttaatttgtaaagctatgtgaagtcagtcattctgtacataagaaaacctggagatgctgtcctctgccttctttatgagccacatgtcaggctgctgccccacactccttccctggtgagggaagctgtcccattcacagtcctggtcacagtgcgtgggagacaactggaaacgcacagttcgggctgcctggaaaacacatgcagcctcctttcagggcctttgatctccctttgtctcccgcacagccaggcacaggttcagcgctcactcgctgccaagtgctggaggcgagctgtgctgctccctcaacattccttagtgccacggctccatgggcactgagttatgagtgtgaaagtttacttctcagggatacagctgcattaaccccgggcacggtgactcatgcctgtaatcccagcactttgggaggctgaggtggacggatcacaaggtcaggagatcaagaccatcctggctaacactgtaaaacccccctctctactaaaaacacaaaaaattagccgggcgtggtggtgggtgcctgtagtcccagctactcaggaggctgaggcaggagaatggcgtgaacccgggaggcggagcttgcagtgagccgagatcgagccactgcactccagcctgggtgacagagcaagactctgtcccccccacccccctccaaaaaaaagaacaaattcaaagcttgttcttaacacattactacctctgagcaagcatattttggtcctcgtaaatgagtggcataaacagatcttttaaggacaatacaagcaaaaccatgatcctgttactctgcagccgcctccacagaagactgctgaacacttccacatgctaggcgcctcactgcagcccctgcggagaactgacgacctcatcgaagaaaggctaacacatttttagccgggcacagtggctctggcctgtaatcccagcactttgggaggccgaggcaggtgaatcacaaggtcaggagttcgagactagtctgatcaatatggttaaaccccgtctctactaaaccgggtatggtggcaggcacctgtagtcccagctactccggagcctgaggcaggagaatcgcttgaacctgggaggtgaaggctgccatgagccaagatcacgccactgcactccagcctgggtgacagagtgagactccgtctcaaaaaaaaaaaaacaaaaacaaacaaaaaagaactaagagcagttttacatatttactcaaatttaaccacattaaaaaaaagaaacttccatccgaatgaccagaaccatttaagttgaagttcaatggttaagtttacttcctatatccatttttctgagatggagttggaatgaccaaaaggagagactagagggagaagcagaaaggatcccttcagaagcccaagaggaacagagagaagcatttgcttaataaaaacaaacaaacaaaacaaaataattaattatgtaaaatggaaaagtattaagggtactgctgaaaagtgagggagtgatatggctcctgggaagcagctctgacccaggactgggaacaggcctaccaggatgacctgttcttcaggagaagccttagggagcacagagaaaatgttagaggaaaataaccgaaaaaccctaatttacttacttggctgctcacttttcagatctgttttcaggactggtccctctgaggctgcaatttcagcccctcagctggtggcatcaatatgcagagacagcagtttctgacagaatttctgcatttgtttcagcaacttgccagtaagaagcacgttaagatcccactatgtccttccagctgcgtttctgggaagccgttgtgatggcaaatgcctacttagcaggcgctgccactgggtattttaaggaagcccatatttttagatgcagccacaagaaactgacactcccctgctggccctcaggtcaccccgggcccaccagagctgcccaggcacagcaggaagccctgtgccaagcatctccaggctgttctcaaagaagtcctagatgctctgatgaggcattgtgttcagtgaaaaaaaaccacccaaaacctgatgagcaatttcgtcactgtgtgatcagtgtcctcacacaaacagagacgtgtgagcatggaggcagtatccttaccacacactgaggccgtaacctgtacagtgtgtaactgtactgaataatggaagtaactgtacatcaatgataagtatctgtgtgtctaaacattatctaaacacagaaaaggtacagtaaaaatacggtataagaaatcaagaacgggacacctgtacagagcacttacggtgaatggagcaggtaggcctgagttgcactgggtgagtcagggagagaatgtgaaggcctgggccctcactggacaccactgtcacctttagaaacaccgtccacttaacactacactcaatttttaaattttcctttcttcaataataaaccctagcctactatggcttttttactttacaaactacttttttaaaagctttaaggtttttgactcttttgtaaacacaaatatatcatatagctgtacaaaaattttttttgttatatccttattccataagcttttttctattaaattttttttaactttttgaacttttttgttataaatgaagacacggccaggcacagtggctcatgcctataatcccagccctctgggaggccgaggcaggaggactgcttcagcccaggatttcgagaacagcccaggcaacacagtgagaccccatctctacaaaaaatcaaaaataaggcaggaagatcacttgggcccaggaggtcaaggctgcaatgagtcatgactgcacttccgcccaggtgagggagagaccctgcctcaaaacaaaacaaaacaaaaaaaccaaaaacccaaaaagacacaaaaaacacatattagcctaggcctacacagggtctggatcttccacctccacatcttgccccactggaaggtattcaggggcaacaacacacatggagctgtcatctcctgtcacaccaattgccttcttctggattcctcctgaagaacctgcctgaggctgctttacagttgactttgtttctagtaagtaggcagaatatgctcttaaaagtatagcaaatacacaaagtagtaacagtcgtttatcatcaattattacgtactgtatggtactgtacgtaactgtaggtgtatactctggtatgactggggcagtaggtttggtcacacctactgcagcaccacagacacgagtaatacactgccctcaacatggtagctccaacgtcaccaggtgccaggaatttttcagcaccatcatagtcttatgggaccactatcatattgtggtctgttgctgaccaaactgcatccggcagcacaggtacaggcatgcccagatggccttggtaatttctgtcagtgggatcacagcaaacacactcagtctgttggtcagggagtgtgcaggaagcctggggggccagcggcatctattcccaactcaggcatcatgccaagacagtgtcttctaaactctgagtaggaactgttctgggtcatttcacagtctttcctttcagaaaacaacagagaactgggaaaccagaagtccccgagcaggaaaagcctcaaaagagagaatcggcggggcactgtggctcatgcttgtaatcccagcactgtgggaggctgaggcagggggatcaccagaggtcgggagttcgagaccagcctgaccaacatggagaaaccccgtccctactaaaaataccaaaaaaaattagccaggcgtggtggcgcgtgcctgtaatcccagctactcgggaggctgaggcaggagaatcacttgagccagggaggtggaggctgcagtgagctgagatcgcgccactgcactccatcctgggcaacaagagcgaaactccatctcaaaaaacaaaaaaagagagaaaatcacaacaatcaagcccaacccagagcccttcactcccagttcctctgctcccccaactcccattcaagtcacagactagaagacagatactgagcggctacagtcgcaagcgcctcaggggcaactaggactgaaactctagcaccagaagcacagcaaggcgggtgaggcctctctgagggaaggacccccaccacacggcaacaacccctcacagcccattacaagttaaaccaacctaacaggcaggcattctcctaagactttctaaaccattctaagtatgacagtttcacacaaaacacggtagcctccaactggctactacaaaccatatctagatttttctcttttaagtacccagggttaggttgggcactagtggctcatgcctataatcctagcactttgggaggctgatgcgtgtggattgcttgagcccatgagttcaagaccagcctgggcaacacagcaatatttcatgtctactaaaaatttaaaaattagctgggcgtggtggcacatgcctgtagtcctagctacttgggaggttgaggtgggagaatcacctgagcctgggaagtcgaggctgcagtgagccatgatcacatcatgcactccagcctgggcaatggagtgagaccctgtctccaacaaaaaaggacccagagctattgatatgcccactatcttaactgtggccatggctccaaaggtatgtctgtgtaaatcaaaagttataaaaccatactgtatactctacatatggagctaagacacccactgacataaaaataatcgatttgtaaagaaatcctcccaaacaacacaaaagctccgactttataaaaatatttttggctgggcacagtggctcatacctgtaatcctagcactttgggaggccaaagcaggaagatcacttgagcccagaagttcaagactagcctgagcaacacaaagagaccctgtgtctacaaccaaccaatcaatcaatcaccaggtgtagtggtgcatgcctgtagtcccagctattcaggaggctgaggcaggaggattgcttaagcccaggaatttgaggctacagtgagctataatcatgcccctgaactctagcttgggtaacagcaggaccctgtctccaaaatacacacacacacacacacacacacacacacacacacacacacacacacttttaagtgtactgatgcaacctccctccccctttattggctaaaattcagtacataataccattaaagtactaaaataataagaacacactagaaaacaagaaattcaaaaaattagttaacttcctgccattacctctatccaaaggcccatcactaaagtcaagtcagttctgcccagaggaagggcagattctcagaaggcaaccaagagacaagaaacagaagcagggtcggagcgcggggcagcgctgccgaggctccacctgtacaaggtttcttggtctctaagctgcttgattcgccaagtgcagtaggagggagggggatgaaggaacattctaagaagttctaagacacctcagaaaagggcagactagttttattccttcacagagaagaggtgaagcctggttttactttaaagtaaacatgcccagtagctgagggctacttggagtggcggaggaaggaatgtgaatcacagcacacgaaatggagcactcagagcatctgctttgtgctgccccatgaggcctgctcaccaaagtgaggagctcacagaggtgcagcccctcatccaagccaacggcctggaggtaggaaagtgaggcaggggaagtctgattcccgagttggactcttagacataaacagataccgcttctcttgggagttttgctgcaacagcagcacagaggagagagagcagctcccagtagattttaaccagggcaactgtatcccccaaaaaacatccaccaagacagttttgcttgctacaactggggatggggagaaggagttgctaatggcatctagtgggtgggaagccagggaggctgctaaacatccaacaatgcacaggacagcccccaaaacagaatgttcccgtgcaaaatgtccacagtgccaaggcagagaaagcctgaattacctaagaaaacagggcagctatgactcactgggccctgctgtatcaggtactgtctcagcgctttatgtgcaccatctgatgtcatcctcccaacaattctacaaacagttactactctctctcttctacagaaaaggaaattgaggcaagagaaggcaagccatggacacaggccagtcagtggtggagttaaaattgaaaccaggctgggcgcggtgcctcacgcctataatcccagcactctgggaggccgaggcgggtggatcacctgaggtcaggagtttgagaccagcctggccaacatggtgaaaccccgtctctactaaaaatacaaaaattagctagacgtggtagtgggtgcctgcaattccagctactcccgaggctgaggcaggaggaatgcttgaacccgggaggcagaggctgcagcaggctgagatcacgccattgcgctccagcctgggtggcaagagtgagacgctgtctcaaaaaaaggactgaaacccaggcggcctctggctccacagtcgctccacagcccagctcttagctgcctccccagaccacaattccaatcatccagagctaagaataaccaggaagcttcagaaacacacacacacctccactgcgtcaaaggcaagacacaccactgacccacaaacactagagccaactagacctgtttgcatcccagccccagtgggatgccgcctcctccacagggaaaatcattttcaccccactgatgcccaaggttaacaggagtcacatcttcatgagcagtctatcattcctaatactttatagtctgctgctttgttgtttaggataatttaaaaatcagaaatgacagtaaaggtacaaaacaattaaaaccaacttaaaaacaaatatatgctaacaaaataaactcacctgatttgactgtccagtaaggtagggctcaaagtcattgtcatgaactgtatccttctgatgtaacgaaccattttgtactagaacaaaaagttgcaaaatattaccctcaaattttaaaagattacttttaagcttggaaggcaaagttagcaaagtctatttccatctatttctagcagaaattatgctttaattttaaaaggagtacaaccagtatagaactgatgtttatacaactaattagaagggggacgggaaactttcaataatttaggataaattttaaataaaggcttaatcgtaatttggtgagattaaccaaatcaagtgttaacacataatgcaaggaacacataaccagggtgaaaactgacatggtctaagaagacttatgtgtggcaaaaagaagtggagcctccaaaagcccaaatgcagaatgtatgcccaaacgtatggagaacggagggaagaaaacttaggagggaaggggctgcaactgaaggactgttgggagctattatctgactctccacagtgaaccccaaatatctgagacaggtctcagttaatttagaaaatttattttgccaaggttaaggacacacccatgatacaacctcaggaggtcttgacaacatgtgcccaaggtagtcgggggacagcttagttttatacattttagggagacatgagaaccatcaatgtaagatgtacattggtttggtccggagaggcgggacaacttgaagcagggagggggcttccaggtcataggtagataagagacaaacggctgcattctttcgagtttctgattagcctttccaaaggaagcaatcagataagcatttatctcagtgagcaggaatgactctgagttctgtcctttgtccaccaggaatttccttgtgggcaaactgtgggggaagtatgtaactttttttgtcttagaagctatctttttcaggaatagaatgggaggcaggtttgccctcagcagttctcagcgtagctttctccctttggctcagtgatttgggtgccccaagactggttttccttttacaccacttaccttcccactgttattatgctcagccagaaaaagcaagcaaaggtaaataaagtgctgggccttttccaatcttaaaacacgatgaaccgtatttggttacacctgagctgacacacaaactggctaaaaaagtgttccaagtaaacgtgaagtgtcacttaacagttttcacatgagtgcgctctgagggtttatcccaagccataatgtcacaggagatgctaacagacttggaaaacgggctgcaactaccggggatgtggagcttagcctgcagaaccttggactgcccctctcctagagcagcccctgctgggcggaaaaaggcaagtcgctcaacccctgcggccatgtccacccggctctcctacctccccttccccaaagcaaatccatgatcatgcggtggggagagacgggcccaaactactctgagcaatcatttattcacttcttgagaagcccctgtcttcgacctgtcaaatctcccagaatcgtcgcacaacctcaagttttatctccctgaagctggcggaagagagaaagtttccggttccagacgcagcttcctggaccgttccttccccgtcctcctccactccagcccgcgccggccgtcccgggactccgctcacctttattatcttgtccttttgttctctgcaccgccgcaggccgggacgtggggtacacacaacccgggggaagagggaaacacaaagttattcaccagagaactggtctccaacgggccgcgagctccgccggccccgacgcgcggtcacgtgcgaccccggccccgagaccccggtcccgcctgggcccggcctccgcgaccccgggctctgcgttccagccccaggacctcaacccagaccccgcgcctcggccccggccgcggcccctgtaacccggccccgctacctgggtgtccacgctggtggccgacatgcttcatgaacaactagacgcggggccggggcgcccgccggctcgggcctcccctagaggccgggcctgtcaccctagctcgcgcggccccgggccccgccgccaattccccgggcgccggccgggcggcggcggcggctgctgggcgcgcgggcccctggcgaggcggcagcggcggtgagcccgggacgcggacgcactgaggaggcgtcgactccaatggcggcggcggcggcgacagcagcggcgacggcggcggcaggggacgagactgcgcggcgtcagcgtgcacgcggggcaggccgggagcgccgcgccgggccgccacacttcgcgcctgcgcgctcccgtcttacgggatggatttcgctctcaggtcccagtctcgtgcggcggggcggggaccgcagccggctgggcggggaagccctgagccggggaagtcacgtggggcgtgtccggaggcgccgcggggcctggcgggaaggggctggcgggctgctgccaggtgtacagccgcccacacacaccccggccacagccgcacccccgacgcgctaccggcactgaggcctctgtagttttccccaaggtccgaagactaaacgctgttctggtccgacagctgggctacgggtctgtccggggtcggtctgcccttcccccgcgcgcaaacacctgcccgcccagagctccgagcccccgcgtgttccaggtcgcgcgcctcggcccttgccgcgggacctgcgggctttgttcgctttgcggccctggccttcagccgcagcggagccctgggcccggtcccggaggtcagctgttgtgtggatgcacccctggacctgcgagaggctcgccggcttataaccaagttctcatgttagattcttgaccccgatttcatcaccaggaggaaaagcagtgctctgtgccccagcctaggccgggccaggggacttgtcatctttgttcgaggatggacagccccttcttagcagcaactgtgcaaagagagcccagttctcagttcctaacccctcagcatccccaacctggacgcccttctggtcaaggtgttgaatttcgctccctgcagccagtatccaatcctgccacccttgtggctaactccctacagaggcttccaggttgatatttttctttccagctctggcagctgtaacatcttcacgtggcctggatctgggtcctgctaaaggagaaagacctggaatggggtgtcaggcaggttgacgtcaaatgagtgttttccacaaagtgggcccgggcagatgcgctaagcagggtgaacagtgacagcagggacggcaatggagtcccaagacggctccaagcctggacatccgcatcagtggggtagcagacagcctctcacactgctgcaggaggaggtggaaactgcccccagcaggccggtcagccacagagaggactgctgctccaagttgctccaggtctccctggagccctgcctcgcctaaagctggggaaagcgggctgggcttgtttccctggaacagagctgggggatgtctggtgccctgaggatgaatctggatcccctgggactttgatgtgtttgggccatgggcagacatctcaggccaggatgaaatctgtgcatttggggtacatccgaaaatgaacagcacgtttccaggatggtggcccacatggagaagatgtgtggggattgtagggacagtggggtccctgggggcaccctgccacctgcttctgtgtgataaggcctgcgcatcctgggcaggccctgagtgcctgcttcccaggacactgaactgtttggcggccaagactgcagcaagggggtgtctgggtggtcagagtagacactcggactcttggagcccctgtctgtcttctcacccagctcccatccctgggccaggacggtgcagtggtcaccactggagttcagagcctcacagccagttacagggccttcagcctcaggcctactttcctcctccgtggtgggttaattactcccctttcacaggatgagtgtgtggaagaaactgggtatgcagcccttggcgtcaggccagggctctgtcaacactggctgttacctgctgccttcacccacaaatgcccagccagtcacaggaggcagcactggccctgcgggaagtggccactccgagcttaggggccttcttagatggctgagtgccggcaatgcaggaccctggaggtgtttcagtttcctggagctatctcaacaaagtacccggaactggggggcttaaaataacggcaatttattctctcccagttctggaggccagaagtctcagatcagtattgctgggctgaagtggagacagaagctccttccagggccctcggggaggatcctagcctcctccagcctccggtggaggccgcagcccttcctggtctttcctcctcgcctccgtcacctcatggccttttcctctgtgcctgtgtctcttcttataaggacactcatctggatttagagcccaccctaatccaggataacctcatcgtcttgtgattatatctgcaaagaacctatttctaaataaagtcacgcaggtaccaggtggacatgagttttgggggtacactcttcagctcactacagagatcactggggaggcctcacagtgatgcctatggagagattttggagggtgactcctggggctgagtaggttctactcacaaatgtagatggaaggagaggcccccacagtgaggcctgaggaggcaccaccatgccagcctagccccactggccagggaagaggctggcaggatcccacagccactgcccggacccacccaggcttttgctgtgaactccagaaggctccatgctgaccctgacatggaaggagactgggggctgcccaggggcaggacaggtctggttggcgggaacagggggccctaaagtgaattgaatgcagggggtgtggcaccagcagggggtgctgaggtccccaggccagctctggggggaaagcctttatcttggccaggcctgaggacctgggagggtgtcacagaaaaccaggagttgagctgcctgtaaccttggagggccacgtccactgcccagcctgcccaggttcacaccccagcccagctctcggccaggaaaagggaggtcacccagcaccgaatgtcaggggacaactgtctctccctcacagggagcaggcagctcctcatgtcatggatggaaacggatcagagggctttggccactcctctgggtggcccagcggtcttgagacaaagcctgccatttctaagcctgtgccgtcaatgacagacaagagcccatcccctgtgggccgtctgccttcagacgggaaccttcttgctcggggaacctgttgctcatccaagagcccttcctagcagtacccgctcctggcagcaccctcaagtggtatgggattgtctaaacatgactagcattaggaaggtttgggtttttatttatttgaaagtcacacaggcgcatggttaaaaagctatctttgcactcaaaggatataaggtgggaagcaaaaaccaccacccccaaacccctcagagagggagccctccagatgcctgcctgtgcatgcaagcatgagtctctgtctccactatctgcccttgcatctcacgtgttgggaaaccgcactttggggatccacagtgctgctgagtatcaacacccgccgtccacccacctcgtccctctccagggagggcatgggctccagcctcatccagtgagtgtcctggccccaacacacatgcacacgtgtgcgaagacacctggcaggaggctcctgcccatggaatcactgggccaaaggcgcttacactggccattgtgctgatgttgccagatggcccccaaggaggctgtaccaaaacccccagccaagaggaggtttctgagctgggtgcagggtccaaacgctgtgggccctgaattcagatgatccctggctgaaccaaacccctcctgagtgctggacacagctcaccctgcagctggcctctgggggctctcagtgaagatacccatctgtctcgatggacaccagccactcacgcagctgccctctccacgaatgctgtctcaggtcctcatctcctccctcacctcaaccccgggctcatccccagtcggcaggcctccttccaaaaccgctccccaccgtactccctggcggggctgctttgtccttgatgaaactggctcctgctctcttggttcctcctgcctccctgtgccttgggagtgcactgacatggagtgtgctgacgtggagtgtgtggagtgcgctgacgtggagtgcgctgatgagtgtgtggagtgggctgacatggagtgggctggcatggagtgtgtggagtgggctgacgtggagtgcgctgacgagtgtgtggagtgcgctgacgtggagtgggctggcgtggagtgtgtggagtgggctggcgtggagtgtgtggagtgggctgacatggaggagtgtgtggagtgcgctgatgtggagtgtggggagtgggctgacgtggagtgtgtggagtgcgctgacgtggagtgcgctgacgtgcctcccatgatgcacggcactttacagttttcaaaccttctctctctaagcttctcattggaccattcaccccacaagtgtgaactgagcacatacttattatgtgtatggggcgtgggggcacgaggtggcccctgcccagcagagctcctggtgctgggaccttccatagccctacaaaggttcatctagcttcactgagcacctgctgttctccacacacggggacagaacaggccaggtgctgctcctgcaacccagatgggaggcagaggtagatgggtcactgtagatctgagctgtgatggaggcaggacagagaggagcccagagactcaggataggcaggcactcaccaaatgaggatgcaggcaggtgggcagggtgccccaggtggatggacagcaggaggcaggacacagcaacacctgcctgcccactggaaggtcaggtccctgagcaggtcccctcgtgtccactgccgagtgcaggtacagggaagacggctcagcacgtggaaggaagctctgcattgcatccagagagccgagggagttagagcaactctggattgctggagcagctaagcctctgagaagttaatgaaagtgtccaggccgcatagttactctggcagctccctgagctctcacctggtcctgagccctggcacctgccctgtccttggccctgctccatcggcatgacatcccccaggggccagcaacccagcctgaacagtaaagctcctagccccggtcctgctggtctgcaggcctcagctccctccctgcttttccaggagttgaaacagggcctctcctaactccactttgccaagagcctcttctcccactgcagagaactgtcatctgcctgtaagtaccagtgccaggtgctctggggccgatgtctccgttagccccaaggtggaggctcagggagcagatgtgagcgtgccttgctcatcgcagtagcttcggactgcagggattgcagggactgcagggattgcagggattgcagggattgcagggactgcagggattgcagggactgcagggactgcagggactgcagggactgcagggactgcagggattgcagggattgcagggattgcagggactgcagggattgcagggactgcagggactgcagggattgcagggactgcagggactgcagggactgcagggattgcagggattgcagggactgcagggactgcattgctcttgcagcaccacccgcctccgtggacaccttcagcagtgagacaatgcaggctctgctacaagaggtgcttactgggctctgctctggtgaggagaggcctcgcctggcagccagacagagtcccagcagggcaagatgaaaattcggggccctcgttcaaacagcaagagaaggctctttccttccttccagcgcccctccctgcacctgtgatggtgtttttatttgttatttaacgtcatgtgctcttgggcaaggggaggggaaactctcacaggcacctgaacctgtccctgtggctccatgcatgggccatgcccctgatccctctgtgcccacacccaggtccctgctgggatgagggttggcaggggtcactgggtggctaaacaccattcctgggggtggggggaggagggttgtgccaagccaggctcccagaccccaagtgcaggcgcatgccaccatctcatcagatggcactcacaaaacacagattcagacaaaagtgttaatatcaagatggtgacgacagcaccctctgggtgtggggccgcttgggtcacatcctatgaggccagccctgggtctgaaagacaccagaggagtccctggatgccaccaggactctggggctctaccagaggtcttcaaagagggggaccatggggacgactcaggctagaaagtggggaggaaaccatgccaggagggggaccagagagtaaccaacatgatcagatgacacagataggcacctgcaggctcaggcttcacagctagagctgcaggtggcccagaaagggaggccccacaatggctggatctacctgggccaggtgcctggggagggccacaggtgggacaggaatgagaatgggcagggctagctctggagaacaggacctggggttgggcggtgctacagggaggcgtgccgggtgctgagtactgtgctagcaaaagacgctgctgatttcatctgcccttgcaaacagcagcctctccccaggggagcacctgtcccaggatgaggaaggccacctggactctcccacccttccacgtggcttgctagctgtcttgggtgactctactggcctgcccggcatgtagctcccttcagttgagtgaccacattcctgatattctttcagggcgtcccctcctcaacccctgtggttggggatggatgcctcacctgggcctgatgccagtccagagagggagaagcaagtgaatgaagatgcttgaacaccaggatccagctgagtctgaaatggtccacttctgtgcttttggttgggtgaagcaatacatttcatttttagctttgagtttctgtcacctgcagctgagtgtcctgaccatagggacaagcataacatacgaacctcgggcctggcccacagttccacagaggaggagtgtgtctggacagtccagccctgctcagatccctcccttgttcccagcgcctcttggaccaggggctccaggtacccgtgcgctagccccacacacctctgcacccctgtctgcctacagtccccaggatgccagccacatgcacatcccccagggccacgctgttccctctgcctgaagccgcctgcttcacctcctctccaaagcttcgtgtggctcctcgagatctcatgctcaccctggggacacctgggaccactgggtcatcacttgtctgtagggacagctccaaggcccctggtgtcacctctgtgctgtcacctgctttatgtccagcagagggagctctgaatcaggagttaggtccttggtgtgcaccttccagctccccagggacctgcctcagtttccccagctgggaggcagcatgtggaagggagcgccagaggggctcaccccacctggtgggcattctgtaacttgtggcctgctgtgtccagcaggtgctgctattgaacctttgaaattgagaaactgccctttcaattttatttaattaaattccagcagacacacgcagctagtggctaatgtctttgacggccaagctcagactccaggcactgatactcaacgctgatccttcacactcccagaaagctttaattaacacacatgtccacccctctgccccccaccgacccccagcagagaaatcaaagtagtctggggtggagttggtgacctacatggtcaggaggcctctggttgagcctgaaacctccaggtgagcctgatggctgcacatgtgcctagcactctgcgaggttggcaagctcctaagacctgctcacccaccctgctccctctgctgcgtggagctggggagtgttcagtggcccctctcactctgcgtgtggagctggggagtgctcactggcccctctcactctgcatgtggagctggggagtgctcactggccctgctcactctgcgtgtggagctggagagtgcagtgtccagtttgcctcttgcagcctcttgcttccccttccctctccagagtcctccctgtggtcccagagctccctgatctagcctttcctaaagctgactcaaccacctcctggattcccaggctggaatctggggccagagatggtgcatctcatgttttcaaatgatgcccagaagctcacagatagcagggctgttcggtggatgtctgggctctgcaggattgcgggaacagaggcctgctgctctcatcctcccgccctccccattaatacaggccttctgtccatccctggccctaggtggcctctcagctcaacttcacaagccacaggggcttgggaagctgcaggaaggagccaggcacagctgtactaaataagcttctccccacccctgcccccaacaggcctgggccaggcatgccaggaaaataaatcagactaacggacccaggtggggccacagccacgggaggtgtggtccagacagctgccgtggcactgaggaatgctgaccatccagactgagacccatggtcgggtcagcatccagcccagcccagtccagcaggtggggagaagcccgtggtggggcctgctctgggcccacgctggtcttctcaggacgctccctgctggcctcttgcaactctgcctgtggctctctaggcgctggctgggagccagcgctcaccgcagccaaagcccagagggatggacttgcgccaggatgctggccccttggcaggatacctggggagtccctgggctctgggaggccctcagcggggtgcccagggcagtgacccctcgggaacatacctactgctcatttttgttttggggtctgctctggagagctccacctaagactcggggaggaagctgtaaaccaaaaagcatgagaggcagggctcagtcgatcgagacgtttattttgccaaggttaaggacatgcctagaagaaaagcacatggagtcacatgtccttttagtctgtggtctgtgcctttctccaaagatgcttttgagggctccaccatttaaagggggggaaagcaggctggaggggcaagagggaggccttggtaatcacatgctgcaagagaagaggagcaggcaggggaatcgtcagctgtgtgttcctctcatgctcggaaacctgcacttgtatgaaataaggtgaacgtctcctgtagagatgcttcacctgttatctgtaactacctgcttaggaacaaaaagaaaggcagcttctcacatgacttagcttttagtttaatttttttcttgtggcagagtgaattggggtcctgagtttgtttttgtttttgtttttgtttttgttttgaaacagagtttcgctcttgttgcccaggctggagtgcaatggcgtgatctcagctcaccacaacctccgcctccagggttcaagcgattctcctgcctcagcctcccaagtggctgggattacaggcatgcgccaccacgcctggctaattttgtatttttagtagagatggggtttcttcatgttggccaggctggtctcaaactcccaacctcaggtgatccgcccgccttggcctcccaaaatgctgggattacaggcgtgagccactgcactggccttgttttgcgatggagtcttgctcttgttgcccaggctggagtgccgtggtgcagtctcagctcactacaacctccgcctcctgggttcaagcgattctcccacctcagattcccgagtagctgggattacaggcgcgcgccaccccacccagctaatttttttagtagagacggggttttgccatgttggccaggctggtctccaactcctggcttcaagtgatccccacctgcttcagccttccaaagtgctgggattacaggtgtgagtcaccgcgcccagcccctccagaccatctgaaaacaggaaactagccagcctgcctgtctcacttcgagcttcttaatgccgttgccagcctcagaagctggaagcccctcctgtgggcctctgatgcacttgtccggagccctgcggtcccctggagtccttgctctgtggccacagggagggttgctccagtgctggcaggctctggccccccaagctgaggaggaggggaccggctcagccacttttggtgagggcacttagggttgttcagcaggagtggggctgggtgcgggagggttgcctgtcacaggggttaccggcccaccttgcccagcatacacctgctgagcttcctgggaacccaggcctgaggcctggacaggaattggagcttctcctcctccctcccacctctttcctcctcttccctcccacccctttcctcctcctccctcccacccctttcctcctcctccctcccacccctttcctccttctcctcagcttatgtgggctccaggtccagcctcattccagccggcacggcccggaggtgagcaggacctggcctcatgtgactgcaaccacaagcccagactttcgttgcagccactgacccagaatcccaggactgccaggactggacggcccagacgcagtggttgtggggcccacaggtggaggcaggctggaccccgccccaaggttttcccgccacaaacagatctctaagcaggacatgggcaagggtggggaagggaacccgagatcctgcagtaccacaccaggcccccaaggcccctctgtcccaggccctcgtcaggcagatctgggtgtggggcatggccatgccacagcaggccaggatggtgaagcagcccggcgaatttcaccccaaaatacgtgtgacaaaaagagccaaactctgtacaatatttaaagggtttattctgagcctaataccggtggccatggcctgaggtacagtcttattatgtcttgagcacatgtgtcccggtggttgggtgacagcttggttttataccttttagggagacatcggcatcagttagtacatgtgaggtgtacattgctcaggttcaggaaggcagaacgactcaaagcagggggtggggccttacgggtcctgggtgggggcttatgggccctaggtggggctttacgtgtcctgagtgggggcttacgtgtcctgggtggagccttacaggtcctaggtgggggcttacgggtcctagttgggggcttacaggtcctaggtgggggcttacgggtcctgggtggattgtggattcaaagatcttctgattggcagttggttgaaagagttaagttattatctaaagaccaataggaaggagcatctgggttaagataaggggttgtggagactgaggttcttactatgaagatgaagtcccataggtgtctgtccttaaagacagtagatggcaaatgtttcctatgcagacctttagaaggtgctggaccctcaggtaacctcttcaggattgggagggcctggaaggggaaagagctagttatgttaatagagattccttacagacacaaattttcccccacacaagatggctttgcagggccttttctttctttcttttctttcttttttttttttttttttttctttgagatggagttttgctcttgttgcccaggctggagtgcaatgacgtgatctgggctcactgccacctgtgcctcctgggttcaagcgattctcctgcctcagcctccgaagtggctgggattacagccatgcaccaccacacctggctaattttgtatctttggtaaggacagggtttctccacgttggtcaggctggtctcgaactcctgacctcaggtggtctgcctcccttggcctctcaaagtgctgggattataggtgtgagccaccgtgcccggtcttgattttttttttttttttttttgacggagtctcactctgtcgcccaggctggagtgcagtggtgcgatctccgcccactgaaacctcagcctcccaggttctagcaattctcctgcctcagcctcccgagtagctgggactacaggcacacgctgccacgcccggctacgtttctgtattttagtagagacagggtttcaccgtgttgcccaggctggtcttgaactcccgagctcaggcaatccacccgcctcagcctcccagagtactaggattacaggcgtgagccaccacgcccggccaatagggcctttccaaactatggcaaagaaatgtatttggggataaaatatttttctttccttgtttgtcatgtgatattatgccagagtcaggctggcattcgggatcttacagtctgtttagtcagtttggtgttttttttttttttttttttttggagataggatctccctctgtcatcctggctggagttcagtggcccagctcagtgcagcttggacctttctggctcaagcgatcctcctgcctctacctcctgagtagctgggaggacaggtgcacaccaccacacctggctaatttgttcttttgtttgttttgagagatgaggtctcattatgttccccaggctggtcttgaactcctgagctcaggagagcctctggcctcagcctccgaaagtgctgggataacaggcgtgagccactgcgcctggcctgttttgtcaggcttaagagctcgattttaatgttaacgctggtcagtcgttcctgaactccaaaaggaggagggtctcacgaggcctgtctggcccccaccttcctgtcatgggctgaacttgtttttcagatttccttgagtaccgttggccaagagggggctccattcagtcaactaggggcttggaatttttttttggctcacatatggtgcccgggcgtactcactgctctaagtcagaggccactgaagggcggcagatgctggaagaggctctgctgtgattttcccttttctgccttagggccggccccaccatggggaagcgcagtcaccttccaccgcttccctgaaaccccttttctgccttaggccgggccccaccatggagaagcgcagtcaccttccaccccttccctgaaacctcagaaaagagggcagcagcaatgcagccttacctggacggacctgtgccccagataatgtctcctctggaggtcattcgaattccaaagggaatcacttacaagttagttcctgtctctggagtccctcccttctccccgaagatcactcatgccccatcaaaagaaccgtccacactccccgtctcccctccctgatgaagaagggtacaggagcactggcctcccggcaggttctcaggccatcgccctcctgcggccccaccccacgcgtggggatcatgtctcccccggcagcggctgccgctgcctccctggacaggcttcctggccctccatctccgctctcagccaactcattgtgcccctctctgagcctcggtttcctcacctctgaaataagctctgtgcccatctcgaagggtaactgaggagatcagtgagggaatgtgggtgatggccttagcatagggcttggcacactgtcctggttgggaccctcccagtgaatcccaaagcaagctgacatctagctgtcagagaggagaccattccttatattgtcttatacttaatttcttgtttgctgaaaaagtagaagttagaattggcagaagtgaaaaatcacagacaactggggaccacatttcagacctggtgttaaaattcaacctctgacctcagggcttgtgctatctatggattcagacattgtgtaaaaaagcatcatgaaactccctgttctgttctgtttcgttctgatcattggtgcatgcagcccccagtcacataccccttgcttgctcaatagatcacgacccccgcccccacagcccctttagagttgtgagcccttaaaagggacaggaatcacttattcggagagctcggtttctaggacgtgagtctgccgacgatcccagctgaataaagctctttccttccacaatccagtgtctgaggaattttgtctatgactcctcctgctacagctggagggaaactctcttccttcctagccccagttgtctctttgtaactatgatagtttgctgccgatggacacggcaagtctgtatgctgagatgctgggttgcagcaaagaaggggttaatcatagggtcactaaagaagttgctgggagggaacctcaaatccatctcccagaggaatctggggctggggtttgttgttgttgttgtttggtgtctgtttggtgtttgtttgtttgttttttgagacagtcccacgctggaattcaagggcacaatcatagtgaaatggcaaagatttccttgtccccttgcagggcctgcgatggggactggctcgcttctttggggccccgctgctc

SEQ ID NO: 67 - DNA, 2455 bp, Homo sapiens
  CDS (191)..(1441)
gaattcgggcgggcttcttcgctgccgacgtacgacgagtggccgggctcttgcgtctggtaacgcgctgtctctaacgccagcgccgtctcgcgcgcactgcgcacagaccacccgcagacgcccggcagtccgcaggcccaaacgcgcacgcgaccccgctctccgcaccgtacccggccgcctcggcatggcgccccgcagcgcccggcgacccctgctgctgctactgcctgttgctgctgctcggcctcatgcattgtcgtcagcagccatgtttatggtgaaaaatggcaacgggaccgcgtgcataatggccaacttctctgctgccttctcagtgaactacgacaccaagagtggccccaagaacatgacctttgacctgccatcagatgccacagtggtgctcaaccgcagctcctgtggaaaagagaacacttctgaccccagtctcgtgattgcttttggaagaggacatacactcactctcaatttcacgagaaatgcaacacgttacagcgttcagctcatgagttttgtttataacttgtcagacacacaccttttccccaatgcgagctccaaagaaatcaagactgtggaatctataactgacatcagggcagatatagataaaaaatacagatgtgttagtggcacccaggtccacatgaacaacgtgaccgtaacgctccatgatgccaccatccaggcgtacctttccaacagcagcttcagcaggggagagacacgctgtgaacaagacaggccttccccaaccacagcgccccctgcgccacccagcccctcgccctcacccgtgcccaagagcccctctgtggacaagtacaacgtgagcggcaccaacgggacctgcctgctggccagcatggggctgcagctgaacctcacctatgagaggaaggacaacacgacggtgacaaggcttctcaacatcaaccccaacaagacctcggccagcgggagctgcggcgcccacctggtgactctggagctgcacagcgagggcaccaccgtcctgctcttccagttcgggatgaatgcaagttctagccggtttttcctacaaggaatccagttgaatacaattcttcctgacgccagagaccctgcctttaaagctgccaacggctccctgcgagcgctgcaggccacagtcggcaattcctacaagtgcaacgcggaggagcacgtccgtgtcacgaaggcgttttcagtcaatatattcaaagtgtgggtccaggctttcaaggtggaaggtggccagtttggctctgtggaggagtgtctgctggacgagaacagcacgctgatccccatcgctgtgggtggtgccctggcggggctggtcctcatcgtcctcatcgcctacctcgtcggcaggaagaggagtcacgcaggctaccagactatctagcctggtgcacgcaggcacagcagctgcaggggcctctgttcctttctctgggcttagggtcctgtcgaaggggaggcacactttctgcaaacgtttctcaaatctgcttcatccaatgtgaagttcatcttgcagcatttactatgcacaacagagtaactatcgaaatgacggtgttaattttgctaactgggttaaatattttgctaactggttaaacattaatatttaccaaagtaggattttgagggtgggggtgctctctctgagggggtgggggtgccgctgtctctgaggggtgggggtgccgctgtctgaggggtgggggtgccgctctctctgagggggtgggggtgccgctttctctgagggggtgggggtgccgctctctctgagggggtgggggtgctgctctctccgaggggtggaatgccgctgtctctgaggggtgggggtgccgctctaaattggctccatatcattgagtttagggttctggtgtttggtttcttcattctttactgcactcagatttaagccttacaaagggaaacctctggccgtcacacgtaggacgcatgaaggtcactcgtgtgaggctgacatgctcacacattacaacagtagagagggaaaatcctaagacagaggaactccagagatgagtgtctggagcggcttcagttcagctttaaaggccaggacgcgcgacacgtggctggcggcctcgttccagtggcggcacgtccttggcgtctctaatgtctgcagctcaagggctggcacttttttaaatataaaaatggtgttatttttatttttttttgtaaagtgatttttggtcttctgttgacattcgggtgatcctgttctgcgctgtgtacaatgtgagatcggtgcgttctcctgatgttttgccgtggcttggggattgtacacgggaccagctcacgtaatgcattgcctgtaacaatgtaataaaaagcctctttctttcaaaaaaaccccgaattc

SEQ ID NO: 68 - protein, 416 aa, Homo sapiens
MAPRSARRPLLLLLPVAAARPHALSSAAMFMVKNGNGTACIMANFSAAFSVNYDTKSGPKNMTFDLPSDATVVLNRSSCGKENTSDPSLVIAFGRGHTLTLNFTRNATRYSVQLMSFVYNLSDTHLFPNASSKEIKTVESITDIRADIDKKYRCVSGTQVHMNNVTVTLHDATIQAYLSNSSFSRGETRCEQDRPSPTTAPPAPPSPSPSPVPKSPSVDKYNVSGTNGTCLLASMGLQLNLTYERKDNTTVTRLLNINPNKTSASGSCGAHLVTLELHSEGTTVLLFQFGMNASSSRFFLQGIQLNTILPDARDPAFKAANGSLRALQATVGNSYKCNAEEHVRVTKAFSVNIFKVWVQAFKVEGGQFGSVEECLLDENSTLIPIAVGGALAGLVLIVLIAYLVGRKRSHAGYQTI

SEQ ID NO: 69 - DNA, 580 bp, Homo sapiens
  CDS (44)..(424)
ggcacgaggcgctcctctgggcccgcgcgggagagaggccgagatggcagatgagattgccaaggctcaggtcgctcggcctggtggcgacacgatctttgggaagatcatccgcaaggaaataccagccaaaatcatttttgaggatgaccggtgccttgctttccatgacatttcccctcaagcaccaacacattttctggtgatacccaagaaacatatatcccagatttctgtggcagaagatgatgatgaaagtcttcttggacacttaatgattgttggcaagaaatgtgctgctgatctgggcctgaataagggttatcgaatggtggtgaatgaaggttcagatggtggacagtctgtctatcacgttcatctccatgttcttggaggtcggcaaatgcattggcctcctggttaagcacgttttggggataattttctcttctttaggcaatgattaagttaggcaatttccagtatgttaagtaacacacttatttttgcctgtgtatggagagattcaagaaataattttaaaaccgcatacataataaaagacattgttgcatggcta

SEQ ID NO: 70 - protein, 126 aa, Homo sapiens
MADEIAKAQVARPGGDTIFGKIIRKEIPAKIIFEDDRCLAFHDISPQAPTHFLVIPKKHISQISVAEDDDESLLGHLMIVGKKCAADLGLNKGYRMVVNEGSDGGQSVYHVHLHVLGGRQMHWPPG

SEQ ID NO: 71 - DNA, 685 bp, Homo sapiens
  misc_feature (493)..(493): n is a, c, g, or t
gtcagaagaggagcagagcagcagctccgtgaagaaagatgagactaatgtgaagatggagtctgaggggggtgcagatgactctgctgaggagggggacctactggatgatgatgataatgaagatcggggggatgaccagctggagttgatcaaggatgatgaaaaagaggctgaggaaggagaggatgacagagacagcgccaatggcgaggatgactcttaagcacatagtggggtttagaaatcttatcccattatttctttacctaggcgcttgtctaagatcaaatttttcaccagatcctctcccctagtatcttcagcacatgctcactgttctccccatccttgtccttcccatgttcattaattcatattgccccgcgcctagtcccattttcacttcctttgacgctcctagtagttttgttaagtcttaccctgtaatttttgcttttaattttgatacctctttatgacttaacaatanaaaggatgtatggtttttatcaactgtcttccagtagttgcttcctaactgcaagggcatctcattaattgagtagctcttgaaagagctttgagttagaaatatgtgtgttacaccctcacattagtgtgctgcgtggggaagttaacacaaatgttacaatgtatttttgtgaatgaaagttggatgtca

SEQ ID NO: 72 - DNA, 580 bp, Homo sapiens
  CDS (60)..(371)
cttccggcgggtgacattcagccggcggttcggggcgacggactctccattccagaaccatggcccaatttgtccgtaaccttgtggagaagaccccggcgctggtgaacgctgctgtgacttactcgaagcctcgattggccacattttggtactacgccaaggttgagctggttcctcccacccctgctgagatccctagagctattcagagcctgaaaaaaatagtcaatagtgctcagactggtagcttcaaacagctcacagttaaggaagctgtgctgaatggtttggtggccactgaggtgttgatgtggttttatgtcggagagattataggcaagcggggcatcattggctatgatgtttgaagaccaatctttaacatctgattatatttgatttattatttgagtgttgttggaccatgtgtgatcagactgctatctgaataaaataagatttgtcaaaaaaaaaaaaaaaaaaaaaaaaaaaaaaaaaaaaaaaaaaaaaaaaaaaaaaaaaaaaaaaaaaaaaaaaaaaaaaaaaaaaaaaaagaaaaaaaaaaaaaaaaaaaaaa

SEQ ID NO: 73 - protein, 103 aa, Homo sapiens
MAQFVRNLVEKTPALVNAAVTYSKPRLATFWYYAKVELVPPTPAEIPRAIQSLKKIVNSAQTGSFKQLTVKEAVLNGLVATEVLMWFYVGEIIGKRGIIGYDV

SEQ ID NO: 74 - DNA, 1235 bp, Homo sapiens
ggcgccatgtccggccgcgaaggtggcaagaagaagccactgaaacagcccaagaagcaggccaaggagatggacgaggaagataaggctttcaagcagaaacaaaaagaggagcagaagaaactcgaggagctaaaagcgaaggccgcggggaaggggcccttggccacaggtggaattaagaaatctggcaaaaagtaagctgttccttgtgcctgaggagatggtgaccctttatttcatctgtatttaaacctctctattccctgccataacatcttttgccacgtatagctggaattaagtgttgtcttggagctgttgtacatttaagaataaacttttgtaaaaccaagaaaaatcttacagtggctcatcatctctttagttgttttcactaagtcgttcctaccataactgtgaatttaaagtaaaaccagctcagaatcttgccagagtctgttctttggtccttgttctaccctaaactttgtatcacctgaaattaaaccaactcatttgaacaaacaaaaacaaaaacaacacaaaaaaaaaacaaaaacaaacaaaacaaaacagggggtgggcgcccacaaaaaatacacccagagaaagggcccacaattatagcgagctacccgagatatgttgtgaacaaggaggtggccccatatagggagggcgcgaatataaaacgaatgccgcagcggcgagagaggtacaacaagagcgaggatgagcggggaaacaacacgtacagaaggggaaacctctgggaggagagcaaacccccaccacgccgcgcgggggcacacacaattgagggagaccaccacacctcagacaaggcaacataacagcgcccgcacgagcacaaatacacaccgcagcgcgcaactagtgagggatcaaccacagcgaatcatatacgcaggacgagaacagactggaccatgagggtggaataaaacatcaggcgcacgagagagaaggaaacagcagcacacgtacagatgacaaggaccaggagcggacgcgagccaccagcgcagcaaggcgcgcgatgaccacatgtggtaaccccgcgaagcacagaccaacaacgcagataccagaaagcaggaaggcaccaaccgagccagctcacaccacgcccgacgccgcgacacagcagggcagaccagcgccgactacagccgctaacaccgacgccatcgaaccacacacgcgcagtg

SEQ ID NO: 75 - DNA, 2016 bp, Homo sapiens
  CDS (35)..(649)
ggcacgaggggcggcagccatcaggtaagccaagatgggtgcatacaagtacatccaggagctatggagaaagaagcagtctgatgtcatgcgctttcttctgagggtccgctgctggcagtaccgccagctctctgctctccacagggctccccgccccacccggcctgataaagcgcgccgactgggctacaaggccaagcaaggttacgttatatataggattcgtgttcgccgtggtggccgaaaacgcccagttcctaagggtgcaacttacggcaagcctgtccatcatggtgttaaccagctaaagtttgctcgaagccttcagtcccttgcagaggagcgagctggacgccactgtggggctctgagagtcctgaattcttactgggttggtgaagattccacatacaaattttttgaggttatcctcattgatccattccataaagctatcagaagaaatcctgacacccagtggatcaccaaaccagtccacaagcacagggagatgcgtgggctgacatctgcaggccgaaagagccgtggccttggaaagggccacaagttccaccacactattggtggctctcgccgggcagcttggagaaggcgcaatactctccagctccaccgttaccgctaatataagtaaagtttgtaaaattcatacttaataaacaatttaggacagtcatgtctgcttacaggtgttatttgtctgttaaaactagtctgcagatgtttcttgaatgctttgtcaaattaagaaagttaaagtgcaataatgtttgaagacaataagtggtggtgtatcttgtttctaataagataaacttttttgtctttgctttatcttattagggagttgtatgtcagtgtataaaacatactgtgtggtataacaggcttaataaattctttaaaaggagagaactgaaactagccctgtagatttgtctggtgcatgtgatgaaacctgcagctttatcggagtgatggcaatgctctgctggtttattttcaagtggctgcgttttttttagtttggcaggtgtagactttttaagttgggctttagaaaatctgggttagcctgaagaaaattgcctcagcctccacagtaccattttaaattcacataaaaggtgaaagctcctggttcagtgccatggcttcatggcattcagtgattagtggtaatggtaaacactggtgtgttttgaagttgaatgtgcgataaaattattagccttaagattggtaagctagcaatgaatgctagggtgggaagctggtgagccagtggccattagataaatacctttcaagtgtgagcttagacgtcaaccctaaaatacttaaccgtaatgctaattgtgatcattatgaatcccttcagtcacattagggggaaagtagttggctataagtacgtcattcttagtccagtcagtcttaaaaacatcttgggttacccactctgtccactcccataggctacagaaaaagtcacaagcgcatggtttccaaccatatgtgttttctgcagttatttctcttgttctggccaaacaaccctaaaaatccttaccattccacaaagttggaccatcacttgtgcacccactttgactatgagtataccaccacattgcatttctgtttgcaccatgtcttccaggagactagactactgttgtccagggtcaatttgagtgtaaagaaaatgtagacaaggaattgcccaattttaaattctgactttgctgacttaatttaaatgctcgttctgaaccaattttctcctatcttctctaggggtttcaaaagactcagttaattgatttccaggaagtactcatagcaagttcataaaagttcttgagacctaaatttcttcacaaaaaaagaaaagatcttaagtcatacattttaattgtgtagaggttgttcaactgaaggaataaatgtatattaaactaaaaaaaaaaaaaaaaaaaaaaaaaaaaa

SEQ ID NO: 76 - protein, 204 aa, Homo sapiens [sequence omitted]

SEQ ID NO: 77 - DNA, 442 bp, Homo sapiens
  CDS (28)..(405)
cttcctttccaacttggacgctgcagaatggctcccgcaaagaagggtggcgagaagaaaaagggccgttctgccatcaacgaagtggtaacccgagaatacaccatcaacattcacaagcgcatccatggagtgggcttcaagaagcgtgcacctcgggcactcaaagagattcggaaatttgccatgaaggagatgggaactccagatgtgcgcattgacaccaggctcaacaaagctgtctgggccaaaggaataaggaatgtgccataccgaatccgtgtgcggctgtccagaaaacgtaatgaggatgaagattcaccaaataagctatatactttggttacctatgtacctgttaccactttcaaaaatctacagacagtcaatgtggatgagaactaatcgctgatcgtcagatcaaataaagttataaaattgc

SEQ ID NO: 78 - protein, 125 aa, Homo sapiens [sequence omitted]

SEQ ID NO: 79 - DNA, 605 bp, Homo sapiens
tttttttttttttttttcacattgtcagatcatttatttcagcgcagttacacccagcagaggggcacaggcttaaacgccggcatattagttttcccgcacgcgagccctgcatggcggtgggctggggagccggggcggtgcgattctgccacacgccacgctctactaggcccccttactcctaattaattgcctgctcaccagactgtgagaaaataattgccactataaattttccctcctctgcataaaatattcgggggaaccagcacttaaaaaacagacttcatgaaagaagggcagcaaggcgtggatgctgcgccccccacaacccccactgcagaggacacagagaggccaggagccccttcctggttccccctggttccaaatgagacagaaaggctcaaagagctcccaggaatggtcacagctgaaaaaaagtcgagtgagtggctacatgcggcagccgcttgtgttcacctgccgtccacccaggacagtccccggcagcagcttgtgttcacctgccctccacccaggacagtccccggcagcagcttgtgttcacctgcccttcacccaggacagtccccgggctg

SEQ ID NO: 80 - DNA, 838 bp, Homo sapiens
  CDS (22)..(678)
cctctttttccggctggaaccatggagggtgtagaagagaagaagaaggaggttcctgctgtgccagaaacccttaagaaaaagcgaaggaatttcgcagagctgaagatcaagcgcctgagaaagaagtttgcccaaaagatgcttcgaaaggcaaggaggaagcttatctatgaaaaagcaaagcactatcacaaggaatataggcagatgtacagaactgaaattcgaatggcgaggatggcaagaaaagctggcaacttctatgtacctgcagaacccaaattggcgtttgtcatcagaatcagaggtatcaatggagtgagcccaaaggttcgaaaggtgttgcagcttcttcgccttcgtcaaatcttcaatggaacctttgtgaagctcaacaaggcttcgattaacatgctgaggattgtagagccatatattgcatgggggtaccccaatctgaagtcagtaaatgaactaatctacaagcgtggttatggcaaaatcaataagaagcgaattgctttgacagataacgctttgattgctcgatctcttggtaaatacggcatcatctgcatggaggatttgattcatgagatctatactgttggaaaacgcttcaaagaggcaaataacttcctgtggcccttcaaattgtcttctccacgaggtggaatgaagaaaaagaccacccattttgtagaaggtggagatgctggcaacagggaggaccagatcaacaggcttattagaagaatgaactaaggtgtctaccatgattatttttctaagctggttggttaataaacagtacctgctctcaaattgaaaaaaa

SEQ ID NO: 81 - protein, 219 aa, Homo sapiens
MEGVEEKKKEVPAVPETLKKKRRNFAELKIKRLRKKFAQKMLRKARRKLIYEKAKHYHKEYRQMYRTEIRMARMARKAGNFYVPAEPKLAFVIRIRGINGVSPKVRKVLQLLRLRQIFNGTFVKLNKASINMLRIVEPYIAWGYPNLKSVNELIYKRGYGKINKKRIALTDNALIARSLGKYGIICMEDLIHEIYTVGKRFKEANNFLWPFKLSSPRGG

SEQ ID NO: 82 - DNA, 1433 bp, Homo sapiens
  CDS (122)..(703)
ggcacgaggctcgttagtccacggtctggtcttcagctacccgccttcgtctccgagtttgcgactcgcggaccggcgtccccggcgcgaagaggctggactcggattcgttgcctgagcaatggctgccatccggaagaaactggtgattgttggtgatggagcctgtggaaagacatgcttgctcatagtcttcagcaaggaccagttcccagaggtgtatgtgcccacagtgtttgagaactatgtggcagatatcgaggtggatggaaagcaggtagagttggctttgtgggacacagctgggcaggaagattatgatcgcctgaggcccctctcctacccagataccgatgttatactgatgtgtttttccatcgacagccctgatagtttagaaaacatcccagaaaagtggaccccagaagtcaagcatttctgtcccaacgtgcccatcatcctggttgggaataagaaggatcttcggaatgatgagcacacaaggcgggagctagccaagatgaagcaggagccggtgaaacctgaagaaggcagagatatggcaaacaggattggcgcttttgggtacatggagtgttcagcaaagaccaaagatggagtgagagaggtttttgaaatggctacgagagctgctctgcaagctagacgtgggaagaaaaaatctgggtgccttgtcttgtgaaaccttgctgcaagcacagcccttatgcggttaattttgaagtgctgtttattaatcttagtgtatgattactggcctttttcatttatctataatttacctaagattacaaatcagaagtcatcttgctaccagtatttagaagccaactatgattattaacgatgtccaacccgtctggcccaccagggtccttttgacactgctctaacagccctcctctgcactcccacctgacacaccaggcgctaattcaaggaatttcttaacttcttgcttctttctagaaagagaaacagttggtaacttttgtgaattaggctgtaactactttataactaacatgtcctgcctattatctgtcagctgcaaggtactctggtgagtcaccacttcagggctttactccgtaacagattttgttggcatagctctggggtgggcagttttttgaaaatgggctcaaccagaaaagcccaagttcatgcagctgtggcagagttacagttctgtggtttcatgttagttaccttatagttactgtgtaattagtgccacttaatgtatgttaccaaaaataaatatatctaccccagactagatgtagtattttttgtataattggatttcctaatactgtcatcctcaaagaaagtgtattggttttttaaaaaagaaagtgtatttggaaataaagtcagatggaaaattcaaaaaaaaaaaaaaaaaa

SEQ ID NO: 83 - protein, 193 aa, Homo sapiens
MAAIRKKLVIVGDGACGKTCLLIVFSKDQFPEVYVPTVFENYVADIEVDGKQVELALWDTAGQEDYDRLRPLSYPDTDVILMCFSIDSPDSLENIPEKWTPEVKHFCPNVPIILVGNKKDLRNDEHTRRELAKMKQEPVKPEEGRDMANRIGAFGYMECSAKTKDGVREVFEMATRAALQARRGKKKSGCLVL

SEQ ID NO: 84 - DNA, 841 bp, Homo sapiens
  CDS (82)..(537)
gcaaccactgcagctgggccaagtcgcttagctcttcggtggttgtcacacgtccggaggcctagccgtcgcgtacctaggatgccgcgtggaagccgaagccgcacctcccgcatggcccctccggccagccgggcccctcagatgagagctgcacccaggccagcaccagtcgctcagccaccagcagcggcacccccatctgcagttggctcttctgctgctgcgccccggcagccaggtctgatggcccagatggcaaccactgcagctggcgtggctgtgggctctgctgtggggcacacattgggtcacgccattactgggggcttcagtggaggaagtaatgctgagcctgcgaggcctgacatcacttaccaggagcctcagggaacccagccggcacagcagcagcagccttgcctctatgagatcaaacagtttctggagtgtgcccagaaccagggtgacatcaagctctgtgagggtttcaatgaggtgctgaaacagtgccgacttgcaaacggattggcctaatgaagaagttcaacctggagagatggaaaatcagctctcataactaagttaatttagtataaaaatagaattgatagtgagggtataaagtgtaaccatcagttaaacctctcctgtcattcctagcttccttgcttcagaattgaaatggaagtgggggtgtccctactctgtagaatctgggactgggcaaatgtttgtgtggcctccttaaactagctgttatgttatgattttattctttgtgagttaattagaataaagtcattttcttacaaaaaaaaaaaaaaaaaaaaaaaaaaaa

SEQ ID NO: 85 - protein, 151 aa, Homo sapiens
MPRGSRSRTSRMAPPASRAPQMRAAPRPAPVAQPPAAAPPSAVGSSAAAPRQPGLMAQMATTAAGVAVGSAVGHTLGHAITGGFSGGSNAEPARPDITYQEPQGTQPAQQQQPCLYEIKQFLECAQNQGDIKLCEGFNEVLKQCRLANGLA

SEQ ID NO: 86 - DNA, 351 bp, Homo sapiens
ctttcactacactacaggatatgatctccatgtagtccatataaacctgcagagtgattttccagagtgctcgatactgttaattacatctccattagggctgaaaagaatgacctacgtttctgtatacagctgtgttgcttttgatgttgtgttactgtacacagaagtgtgtgcactgaggctctgcgtgtggtccgtatggaaagcctggtagccctgcgagttaagtactgcttccattcattgtttacgctggaatttttctccccatggaatgtaagtaaaacttaagtgtttgtcatcaataaatggtaatactaaaaaaaaaaaaaaaaaaaaaaaaaaaag

SEQ ID NO: 87 - DNA, 1864 bp, Homo sapiens
  CDS (16)..(1239)
gtggtttttcggatcatgtctggtggctccgcggattataacagagaacatggcggcccagagggaatggaccccgatggtgtcatcgagagcaactggaatgagattgttgataactttgatgatatgaatttaaaggagtctctccttcgtggcatctatgcttacggttttgagaagccttccgctattcagcagagagctattattccctgtattaaagggtatgatgtgattgctcaagctcagtcaggtactggcaagacagccacatttgctatttccatcctgcaacagttggagattgagttcaaggagacccaagcactagtattggcccccaccagagaactggctcaacagatccaaaaggtaattctggcacttggagactatatgggagccacttgtcatgcctgcattggtggaacaaatgttcgaaatgaaatgcaaaaactgcaggctgaagcaccacatattgttgttggtacacccgggagagtgtttgatatgttaaacagaagatacctttctccaaaatggatcaaaatgtttgttttggatgaagcagatgaaatgttgagccgtggttttaaggatcaaatctatgagattttccaaaaactaaacacaagtattcaggttgtgtttgcttctgccacaatgccaactgatgtgttggaagtgaccaaaaaattcatgagagatccaattcgaattctggtgaaaaaggaagaattgacccttgaaggaatcaaacagttttatattaatgttgagagagaggaatggaagttggatacactttgtgacttgtacgagacactgaccattacacaggctgttatttttctcaatacgaggcgcaaggtggactggctgactgagaagatgcatgccagagacttcacagtttctgctctgcatggtgacatggaccagaaggagagagatgttatcatgagggaattccggtcagggtcaagtcgtgttctgatcactactgacttgttggctcgcgggattgatgtgcaacaagtgtctttggttataaattatgatctacctaccaatcgtgaaaactatattcacagaattggcagagggggtcgatttgggaggaaaggtgtggctataaactttgttactgaagaagacaagaggattcttcgtgacattgagactttctacaatactacagtggaggagatgcccatgaatgtggctgaccttatttaattcctgggatgagagttttggatgcagtgctcgctgttgctgaataggcgatcacaacgtgcattgtgcttctttctttgggaatatttgaatcttgtctcaatgctcataacggatcagaaatacagattttgatagcaaagcgacgttagtcgtgagctcttgtgaggaaagtcattggctttatcctctttagagttagactgttggggtgggtataaaagatggggtctgtaaaatctttctttcttagaaatttatttcctagttctgtagaaatggttgtattagatgttctctatcatttaataatatacttgtggactaaaagatataagtgctgtataaaatcagccaattatgttaaactagcatatctgcctttattgtgtttgtcattagcctgagtagaaaggcctttaaaatttttttagaaagcatttgaatgcattttgtttggtattgtatttattcaataaagtatttaattagtgctaagtgtgaactggaccctgttgctaagccccagcaagcaatcctaggtagggtttaatccccagtaaaattgccatattgcacatgtcttaatgaagtttgaatgttaaataaattgtatattcacttt

SEQ ID NO: 88 - protein, 407 aa, Homo sapiens
MSGGSADYNREHGGPEGMDPDGVIESNWNEIVDNFDDMNLKESLLRGIYAYGFEKPSAIQQRAIIPCIKGYDVIAQAQSGTGKTATFAISILQQLEIEFKETQALVLAPTRELAQQIQKVILALGDYMGATCHACIGGTNVRNEMQKLQAEAPHIVVGTPGRVFDMLNRRYLSPKWIKMFVLDEADEMLSRGFKDQIYEIFQKLNTSIQVVFASATMPTDVLEVTKKFMRDPIRILVKKEELTLEGIKQFYINVEREEWKLDTLCDLYETLTITQAVIFLNTRRKVDWLTEKMHARDFTVSALHGDMDQKERDVIMREFRSGSSRVLITTDLLARGIDVQQVSLVINYDLPTNRENYIHRIGRGGRFGRKGVAINFVTEEDKRILRDIETFYNTTVEEMPMNVADLI

SEQ ID NO: 89 - DNA, 1972 bp, Homo sapiens
  CDS (122)..(988)
gaattcggcacgagggcgaccggcgcgtcgtgcggggctgcggcggagcctccttaaggaaggtgcaagaggttggcagcttcgattgaagcacatcgaccggcgacagcagccaggagtcatgagcgacagcggcgagcagaactacggcgagcgggaatcccgttctgcttccagaagtggaagtgctcacggatcggggaaatctgcaaggcatacccctgcaaggtctcgctccaaggaagattccaggcgttccagatcaaagtccaggtcccgatctgaatctaggtctagatccagaagaagctcccgaaggcattatacccggtcacggtctcgctcccgctcccatagacgatcacgtagcaggtcttacagtcgagattatcgtagacggcacagccacagccattctcccatgtctactcgcaggcgtcatgttgggaatcgggcaaatcctgatcctaactgttgtcttggagtatttgggctgagcttgtacaccacagaaagagatctaagagaagtgttctctaaatatggtcccattgccgatgtgtctattgtatatgaccagcagtctaggcgttcaagaggatttgcctttgtatattttgaaaatgtagatgatgccaaggaagctaaagaacgtgccaatggaatggagcttgatgggcgtaggatcagagttgatttctctataacaaaaagaccacatacgccaacaccaggaatttacatggggagacctacctatggcagctctcgccgtcgggattactatgacagaggatatgatcggggctatgatgatcgggactactatagcagatcatacagaggaggaggtggaggaggaggaggatggagagctgcccaagacagggatcagatttatagaaggcggtcaccttctccttactatagtcgtggaggatacagatcacgttccagatctcgatcatactcacctcgtcgctattaaagcatgaagactttctgaaacctgccctagagctgggatattgtttgtgggcaatattttttattgtctcttgtttaaaaagtgaacagtgcctagtgaagttaggtgacttttacaccttttacgatgactacttttggtggagttgaaatgctgttttcattctgcatttgtgtagtttggtgctttgttccaagttaagtgttttcagaaaagtatgttttgcatgtatttttttacagtctaaattttgactgctgagaagtttctattgtacaaaacttcatttaaaaggtttttctactgaatccagggtattctgaagatcgaagcctgtgtaaaatgctaccaaatggcaaaaagcaacaataaacagtttgatttttacttttctttctaacatatcaatgcttagcagaactattcagattgtcagtagtaaatttaaagacaaatgcccgttttcctccagtccatgaaacataccatacttatatacctgcaactaagtgtttaaaattatgctctgtaactctgtactgctagtattagaactaaaaatcttaaaatacagccagtgcttaatgcttatatcaatgtggatttgtcggcttttatgtaatctgtaatatgtatagcaggaaatacgaagagttacacagtgtatgccttaaaaggctgtttcttaaaggtgttacaaggggataatggtatttcaactagttatcagcaagtgacaatacattccaccacaaatacactcttgttcttctagcttttagactatatgaaaaaaccgggtgcttcaaagtacatgataagggaacactatacctgtcatggatgaactgaagactttgcctgttcattttttaaatattattttcaggtcctttgcttaccaaaggaggcccaatttcactcaaatgttttgagaactgtgtttaaataaacgcaaatgaaaagaaaaaaaaaaaaaaaaaa

SEQ ID NO: 90 - protein, 288 aa, Homo sapiens
MSDSGEQNYGERESRSASRSGSAHGSGKSARHTPARSRSKEDSRRSRSKSRSRSESRSRSRRSSRRHYTRSRSRSRSHRRSRSRSYSRDYRRRHSHSHSPMSTRRRHVGNRANPDPNCCLGVFGLSLYTTERDLREVFSKYGPIADVSIVYDQQSRRSRGFAFVYFENVDDAKEAKERANGMELDGRRIRVDFSITKRPHTPTPGIYMGRPTYGSSRRRDYYDRGYDRGYDDRDYYSRSYRGGGGGGGGWRAAQDRDQIYRRRSPSPYYSRGGYRSRSRSRSYSPRRY

SEQ ID NO: 91 - DNA, 368 bp, Homo sapiens
  CDS (107)..(319)
ctttttcgtccttttccccggttgctgcttgctgtgagtgtctctagggtgatacgtgggtgagaaaggtcctggtccgcgccagagcccagcgcgcctcgtcgccatgcctcggaaaattgaggaaatcaaggacttcctgctcacagcccgacgaaaggatgccaaatctgtcaagatcaagaaaaataaggacaacgtgaagtttaaagttcgatgcagcagatacctttacaccctggtcatcactgacaaagagaaggcagagaaactgaagcagtccctgccccccggtttggcagtgaaggaactgaaatgaaccagacacactgattggaactgtattatattaaaatactaaaaatcct

SEQ ID NO: 92 - protein, 70 aa, Homo sapiens [sequence omitted]

SEQ ID NO: 93 - DNA, 546 bp, Homo sapiens
  CDS (22)..(492)
attggagacccttttcacaagatggcgccgaaagcgaagaaggaagctcctgcccctcctaaagctgaagccaaagcgaaggctttaaaggccaagaaggcagtgttgaaaggtgtccacagccacaaaaagaagaagatccgcacgtcacccaccttccggcggccgaagacactgcgactccggagacagcccaaatatcctcggaagagcgctcccaggagaaacaagcttgaccactatgctatcatcaagtttccgctgaccactgagtctgccatgaagaagatagaagacaacaacacacttgtgttcattgtggatgttaaagccaacaagcaccagattaaacaggctgtgaagaagctgtatgacattgatgtggccaaggtcaacaccctgattcggcctgatggagagaagaaggcatatgttcgactggctcctgattacgatgctttggatgttgccaacaaaattgggatcatctaaactgagtccagctgcctaattctgaatatatatatatatatatcttttcaccat

SEQ ID NO: 94 - protein, 156 aa, Homo sapiens [sequence omitted]

SEQ ID NO: 95 - DNA, 1105 bp, Homo sapiens
  CDS (44)..(436)
gggcgaggagggagcccgcggcggcggcagcagctacagcgaaatggcggagaccgtggctgacacccggcggctgatcaccaagccgcagaacctgaatgacgcctacggaccccccagcaacttcctcgagatcgatgtgagcaacccgcaaacggtgggggtcggccggggccgcttcaccacttacgaaatcagggtcaaggtcgtagttcccccgctccctgggaaagcgtttttgcgtcagcttccttttagaggagatgatggaatatttgatgacaattttattgaggaaagaaaacaagggctggagcagtttataaacaaggtcgctggtcatcctctggcacagaacgaacgttgtcttcacatgtttttacaagatgaaataatagataaaagctatactccatctaaaataagacatgcctgaaatttggcaagaaggggcaaaaacgtgactattaatgattgataagcaccagtgaagaagttctaacttttagcatgctgcacagaaactggtataacatgccttcagtatactaacactcatatgctcagttttgttttgttttggcagttgacaagaagttaatttgctttagtaaaaatccctcattccagcctttctatataaatagctctttcttgctgttttaatgtggtgcacactatagcctcacaaacctgttattccagtgtaatctgcagtgtcgtaactaaagttactggcttggtcttatttgcacagtttttgcgtcttgtttgcttcttgcatctgattaactagaatatttctctttcccccttttaatttgtgatgtcacttgaccccatttatgtgtaggagcactacaccattggtttccaatactgcacacataagatacatacttgtgtgcagaaagtatcttcctccaggcttgtaatacccttcacatggaagattaatgagggaaatctttatattctgtataaaaacaaaagcaaatttatatactaaaatcatttgtctaaaaatttaagttgttttcaaataaaaattaaaatgcatttctgatatgcaaaaaaaaaaaaaaaaaaaaaaaaaaaaaaaaaa

SEQ ID NO: 96 - protein, 130 aa, Homo sapiens
MAETVADTRRLITKPQNLNDAYGPPSNFLEIDVSNPQTVGVGRGRFTTYEIRVKVVVPPLPGKAFLRQLPFRGDDGIFDDNFIEERKQGLEQFINKVAGHPLAQNERCLHMFLQDEIIDKSYTPSKIRHA

SEQ ID NO: 97 - DNA, 119241 bp, Homo sapiens
gatcccagattggagggtcagccagtggttaacatataatggacacaaaactgattttactggaagactgagggtgggcactcaccatggttctaagcattcattactcagaagatccataaaaacattacagttctgttgtgtaagagtttaggaaaaaaagaaaatcctgacaaaaatcccaacctaaaaaacagtgtcaacatttgtaagtaggatggggaggcagagatgaattggcagtgttatcacagctactggactatgtggactttaacaaagtaagaaacgggtgggggttgggtggtggtatcttaatagagcaggagtagagacggatgtcctggggcagaatgggtaccaatgctgcctgaagcctggagctgggagctgaggactaagaggtagacaggagggtggggaccggtacctgctccaaggaactggtgccccagaactggtgagctggggtatgcatttagctcattcgtttaccagaatgcagtcaccacctgatgaaagaaatgactaatggcaggacttgaacagttctctataaatgagtacctgggagaaaaacaggtctccaggctccacaatacccaataaacacactgcctttagcccacttcaagctgcacttcttacatggaacccaacccaaccaacctcagaggtaagggtgagagcaggcaatgaacagctatgattctccattccctggccaggcagggagcctttccatccaccctcgtgagactgcttgtaacagaaataaggaaaccgactccaaggctcagtaacccacccaaggtcagaaccacggagtggcagggcctgtgagccacaaaggagactgaaaaccagaaagagcttctctctggtctgttattttaagaaaaacatgcccagaggggccacctggaagcaaggctgtgtggcaccctcaccttcctaattaaacaacaacttcccaggagcaacgacagcaacaacagcctggcccagcagatgaactcgaatcaatccaagcccttcccctatacgggtcagtttgggcactactttacctgctgtgaagtctactgggatcttccaggaaagtcccacctcattagtaaaaagaaaaacaaagactcgggaagaaagttcctgccctccctgttgaatgctgtgtgaggataagatgtctggagcatggcagtcaccctgtgactatcagaaggccaggcgtaccacaaggtggtcattccagtgctctgaatcagccccaaaccacttccctcaagactcatgttctgaggtgattaaaagtgtgctttgaaggtaaatctaggatgacagtcaacagatcagtgattgccaggagtcaggggtagagggagggaagaacagatggagcacagagaatttttagggcagtgaaaatgttctgtatgatactatatataatggatacatgccattatacacttgtccaaatgcacagaatgtacaccaccaagagtgaaccctaatgtaaactatggactttgggtgatcatgatgtgtcaatgcaggttcgtcaattgcaacacacgtaccattctagtggggggtgttgataacaggaggctatgcatgtgtgggaccaggggatatatgggaaatctctgtacatgcctctcaattttgctgagaatctgaaactgctcttaatgaagtcttacaaaaataaagaagtctgctttgccttaggttgggtcttcagttacctgcagccaaatgaacacaactggcgtgaggtaaacctctgacacttagtgagcacgctacaatgtagtgctgccacgaaaggaataacaaagaaacagaactcaacaactaaaaccacaaagaactatccctgatccgcgacaatgggaacagtgtctcatgtcaggacccagtacacacccacattttgtctgtgtataaacaaaatttacatgtaagttactacatggcatatacttctcatttttaaaaagaatgctgattgtgacccactacatttatttcatgatgcattaatggttcataacccacaatttggaaagtacggtatacctataaaaaattagccttatttcttgccaaacttgaacacggctctgacctgtgcaagatcgtattttgattgcagtgaaagccacagggtactgagacagactccctaaacttcctttttattcctgatcaaatgcaatgccaagcaacctccagacactacatgcatcaatgtatcaatgttgctttgcctgaggtgagatacttcaactatctatctgactggtaccaggctaggagcactaggcaggacacagcctgaatctgctgctgctgctgctgctgagccagcatggagatgtgtatgttcttcagtggctctatgtgaggatgcctgtctaaccccagctctcctgagcctatcttggacactgaggggcaaacctctccctagtatcttaaaaccataaaagccaggaagcaggatttctaagtaaaggagctttaaacaggacctttgcctaggatcttaattttcctatgctattttggatgctctgttgtccctgggaaaggggcatgagacttgctccagaatttcagaccacagtcaccaactgtcaatctcatctactttctaaggagaaatcttcgcagggcagggttgggtggtggcagtgatgttggggttccttgagtccaaggagaggatttcccataatcgagtccgaaagctaaacaataatcccccgaaatgggtggggtggtatgtgattaagtgggtgtcacacaactggcacaagctacaggacaaggagaaggagggcttccccagtggggaggaacaggccacttatctatggccctaagttgtcagcctgggggagaaggtggaagcagtgtttgttaagctggaatgagtgtgcatgtgtaggaattatgctgttcagtctgtaatgtcaaaacagatagtgagaacttccatttctggtcacggtggaggacaaggatcagatttgttcatgaaacaaccaacaaccaaccaaccaaccccttcctccctacaaaaagtccactaaaacctaaaaaccacctagacaaaatagctacaacgatggtttgtaggacaccagacatctgtaatgaagaacaataaatcctgagacatgggaaacaagggcagccctatatccttgggagtttccagggagagggacctggagtggagctcaaggcacctagagtccataggacacagtaccagcaggagagagctatacagagatccccagagatctgcagggtcctctttgagtattcagcagagtccctctcagtgcatgtatctgagcaaactattcaaggccaggaaaagaactatccaaaaggcttagaggaacagtatccagtgctcacacagggctaggattagtgcttactaccccccggtcaaactggagaagctcatgattgacaaagcactgggcagaatactcaggaagatcttgcctatagtaggaaataatcagccctaaactgagctctagacctacctaacaaatcacaaaagcaagactcgcaagcatcaaactgtttccgggtaacttaaatgcttctcagtataaaactcaggaaaatttataggaataaaaatatccagcaccccaaaaggcaaaattcacaatgtctggcatccaaagattaccaggcatgcaaagaggcagaaaacaggacccacaatgaggagacttatcaatcaattgaaagcaacccagaactaacacaaatgttagaattagtagaggagaaccataagactccaactttcagagatgaaaactacaatgtctgagatgaaaattacattgggctgaaatgacaaaatatccacacataacacagtaaaaacttcacaccattatcaagcattaactcaaaatggatcctagacctaaatgttaagtactaaacctatcaaatttatagaagaaaacataggaaagaaatctttgtgacctcgagttgggtgaagatttcttagtatgatgtcaaaaagcactatctataaaagaataaattgaacttcatcaaaataaattcagtactttaaaaagcactgttaagaaaatgaaagacaaaccatacactgggagaaaacttttgcaaagtacatatctgatagaggacttatatccagaatataacaaaccaaaattcaacaattaagaaaaccaataaaaaagggctaaagatttgaacagatacttcattgaaaaagacagagggcaggtaagcatatgaaaagatgctaaacattcctagttattataacaacgcaaattaaaaccactaggaaacgcatctaccaccactgattagaatgagtaaagctaaaaagactgaccacgtcaggtgttagtgaggatgtgaaggaactggtattctcatacactgctagtgggaatataacataaagcttcagaaaacagcttgatagttaagttaaacatacacctcccatatgacccagccattctgatcttgagtatttatccaagagaaatgacaggctatgtccacagaaaaacttgtacacaaatgttcaaagcagatttattagcgatagtcaaaaactataaactaacccaaacatccaccaacgggtaagttggtaaatacatgtttctatatatagaaaaatatttagcaacaaaaaggaacaaacaattgatacatgggacaatacagatgaatctcaaaataattataccaagtgaaagaaggcagacataagagaacgtactgtatgattccatttatataaaactttagaaaatgcaacaaatctacactgacaaaaaagcatatcagtagttgttagaggagggtaaggaggggtgaattcaaagggaaacaatgacacatcaaaatttatgaagctgtacatttttaaaatgtgcagtatattggatttcaatcacgcctcagtaacttttttaaaaaaggaaaagaaaaagagtaggcagtggcatttactaaaatgctatatatgtttagctcccacatacacactggcaatgaatgaaaagtgcttcctctctttggggagggaacaggtaaagcaggcagcaagtcaagtctcagcagctgctccaattttaactctggagatcacttgtgccaggagctggagcccttgaacagtgaaaccacctgccaagttagtgccataatttcctaaagaaagcgtgccctgctcagagaaggcaactgaggttacagtgcagacaagacagctgacagtctttaagctctaaaggccactcagcataaaacatcacaagcattgccttctaattgcagaactgaccaatttcattcctggccgtacaagcctataactcatgcctaacaaactgcctggaatagctccatattcttattttaagtatttagtcttggctctcctgactgaatgcagcccaagctcacagacctggcctgcgttctgtgtcctggtggcacgtatggtgctggtactcaagagcactcttggatttgctttacttgcatgatttttaagaaccagaaggacaagcatgaggccttcatatttagaccttcttccctatatggtaacaagaatatgaggggtaatcccagaatggtaaactttactttaagcacctttagttactaatcagtaagaaaaatgtgaaaatgtgctccagttaaaagcacaagaccatgaaagaagccaaagctatgactgactgcatgcagaggctgttgacgtcatcttcgcctgggtctcctcctgaactgaaatccttggaaagggagcaaaagggtttacaaaacaagacggtgcagagagtctcaagtctgtctactccacagcagcctgctctttcctgttgcttttcaaggaatcagcagagggagacctggccagcagctcctgggcagcaaagtatccccagactgtgttcctggtggttggctcaagccactgaagcggtggttaagactcaagaccaggacctggagattcacaaggaccactgggatactatttcactaataacccaatagaaatggagtcacttccaaggcactctgctttggggaagggcagagtgccatataccttctactgggtaacaggactgaagaaggcacctctacagacttatggcttcactacttgtagtgaaagctcatgactcacaatgcagtttatagttgctcatgaatctttgcaggagtgtttcctataggcagcattttacagggacaaaatatgggaagttttaagattaaaaaaaaaaaaatgactaaactaaaccaaaaatcaaacataacaaaaaaccagaatatcctaagccccaaaccttcaaaataaaataaagtccttgccatttacagtttggagagggaaaaggatttctactttcaacacgcaggtgagtttcttaatgacaaaaagtacaatgaggccagctgcggaggaggctcatgcctgtaatcccagtgctttggaaggccaaggcaggagaatcacttgaggccaggagtttgagactggcatgagtttgcaaccagcctgggcaacacagcaagactcatgtccccaatcctgtttctgcaaaaaattaaaaaaaaaaaaaaaaaaatttagccagacatggtcctagctacttgagtggatcaagtgggagatcacttgagcccagaggtttgaggttgcagtgagctatgaccgcacaagtacactccagactgggcaacagaacgagactctgtctcttaaaaaaaaaaaaaaaggtgtaatggttgaatgggtggaggtagggggagccagtatttttctgcagctttgcatttgaagccactcagaacattcccagatgggcgtatggctcaaggtctaatggtttagctgtttgctttccctcttcttattagacacagaagttctcttaaccaccttttactcagctgccttacttggagactcataaaactcacagccttcgtaccccagcatagtgaagagcactcccctcatgctttagtctctagctcatgatcacttcttcattcccatatgagttctgtgttcacaaagggaggagtggttagctgtgtttgtccccaaatccatttatggtagctatatttactgtgtaaatataatgtaattaaatagtatgtaaatcaataaaatgagtgtgaatacaaacagcggttctagctgactcctgggaaagactcaataaaggcaagtcactaaaaaactattgctagtgaataatcatatgggagactacatttagagaaagaaatcttaaaaatctggaaaggtttggtttttaaatgttctcacaatactctttgctctactttaaaaaaggtcaaattggtttttgcaagaactatgatgggaaactccactagcagagccatcctcaaagataaagacatagtcctttagcaaatgatttatgttagagtttgaaatcaaatgtttacagaagccatgtcacttttatgttagcataccaactacccacttgtctcaatcatgatgggtaaaaagggattctacatttagataggcaaaagatacaaattcaaatcttacattcttattattccatttctgggtctctgtggctgtattccagcacaacctccctgaagtggggttctgagaactccttatgagtgaggggtatgaccaaaggtccaagtgccaacccaaagagggaaccagctcactctcactatcattttcctgagatcaccaacagtgcaagcacatttcccatacgcagtatggaaatgcttctaacctttggctaaatccctttagatcctataaccaaaagtgtattttcaaaggcagggcccatgatgggaagaatatgcaggatccaacggcaataaaaagaacacagaccagaatgcatgccctgtgggtgtgtctctccattttccactttaatcacagtataaataagaggagttactaccacattatatcgcatggggagggggagaaagaaataccactaggccgggtgcagtggctcacgcctgtaatcctagcactttgggaggctgaggcaggtggactgcctgagcttcggagtttgagaccagcctgggcaacatggtgaaaccctgtatctactaaaatacaaaaaatcagccgggcatggtggcgtgcgcctgtagtcccagctacttgggaggctgaggcaggagaactgcttgaacccgggaggcagaggttgcagtgagccgagattgcaccagggcactccagcctgggcgacagagtgagactccatctccaaaaaaatcaaaagaaataccacttaacaatagctagctggaagtggtagaaatatgcattttctatagggtataatggttaaaggcatgagttctggacctctgttacagactattattacaactccctccctggtctccctgcttctgctcttgctctcctacagtctaaacctgacacagcagccagaccctactacccctcggctgaaaaactcctgtgactcccccatctcaggagataaaactcttaaaatggcctacaagaccctctaagaagtgtcaagcctccgcccctaccaccatccctctgacttcacctctgattactcttgtacttttccagtcccagaacattgtttccttatgttctacatacacaccagggatacctccacccgtgggcctttgcatttgctgttctctctgcctaaaatgatcttgctcaaacagtcacataggttacatccttacctccttcaagtctttgctcaaatgtcactttctcattgaggcctttgccaatctatctaaaacctcaaccttttcctattccctccttaacacttactagcttatacacaacagtcttgcttattaatcatatttattatgtcttttccactacagtgtgagatgaaggcaggaactgtgtcttcttcactcctaaattcttggtagccaggacagtgtcttgtacatagcagacattcatcaagtacttacagaaatatcaaaggtacccttttctcctcctggcctgtgtatatacctggaagacgctttcctcctgcctgactgcaccatacacacccaagaccaaatggcacttcctccaagaagttctagcctataggtgtaggttgcctgaggtactttcattgtaactgaccactccctacagggtaagcttcttgagggcaacattgaggctttgcccagctccttatatattcactgagtgaccgagggaatgccaggtcctaactggccactcattcaaacagtcactgaatagctactctatgccaagactgatggggagaccttggagaacaacactagtgtgggtctggcctcctggagccttcagtcggttggggaaagagcagatgtttaactacacggatcctgactatgatgggggctaagaaaatagatgggtgcattgttgcagaattagaagcatgcatgtatgcatccaaagtgttacttaagctgtgctataaagaaaagagcctgtcatgcagtggggagtgggggcagtgtggtggcacctaagcaaaggggcagagacctccatgtgggaaaaggcttggagcattcgaggaatgaatgcaggccaaggtggcttgagctcctgggagaggaagagcaaatgtaacagaaagagacagtagcatctaagaactggttatttctacctccccgactttctgcactgctagaatacacctggtcaaaatcaaaggggtccaggggagggaatgcagagacttggttaagctttttagcaggaaaagaaaacaaaaaaacagaagaaaaaatagaagtaaaaataaacaaatgtcaccatgagcaccaaagggagaactgaatgctatgtgattaagttattcataaccttggcttcttccatgggaaacagcaggtgacaatatttttagagaaaattccaaggcagacaaatgatttccagtttatggatacaataaacccctcagtaattcataaaaatcagtttaagcctaaaaatgttctagttaaaacatctatgagtaaataggtgaatttatggtatgtaaattatattcaataaagctgttaccaagaaaaaaaaaggtcatggaccccactgaaaggaaccagagctctttgaaagatggctgataattggaccagagtagtgaaaccgagaaatggatgaaggaatggtgggagcctgtcaaaaaggtactggagccagcttaaagggctcctactggccaaatttaggatgatattagcatcaaaaagaataatgggtatcattgatcttaaggccctgacaaaaaatttcagcccacagtacagtcaaagcaaatagagggggaaaaagtcacttgcccccactgggaatggcaataccccatcagttaacattcatttttcattttaaaaattggtaattaaaggctgggcacggtggctcatgcctgtactaccagcactttgggaggctaaggagggtggatcacttgaggccaggagtttgagactagcctgggaaacctggcgaaacccgtctctacaaaaaatacaaaaattaggacaggtggcatgcacctgtatgcccaactattcagaaggccggatgggaggccgggatgggagtctgggaggtcgaggctacagtgagccatgatcaagccactgcactccagcctgagtgacagagacactgtctcaaaaaataaaaataaaatttggtatttaaaggtaaagaattactttaccttatcttatagaaggataacagctaataaatttagaaagaatgaaggaattttaaaaatcaacactttgtgaatgccagtgacttcttcaggggagaatgatcagatggtgtaaacaccactaggtgaaaggctgatgagcaagagaccatctatggctacctaagcactccacagatcactgctaaatgcaaagggaaaaatgtacctttacagaaaagatcaaatttagcatcacaactagtgatgtttcccatgtgtgctgaggatgaagtactcacactaaaatgtttaaacggaatctattcagacacttaaaagattaaacatccggttcagaaaatcaaggcagggaacaagttaaacaataccatgagaaaacagtaagacagatgtggagtattctataactagcctgctctctttgaagaaatcagagttattaagaaaaaaacagcgtaaggactcttctagactgagattacagacataacaactgcgatgagtgaggctcaatggaactgtggttttaaaaaagagcaacactttggagacaactgggtagtctcgataggcatttgcttcacagcaggcatcgttactcccattttatagacagcatgtggaagctgggaactgtgggacaatttgttcaagctctcatagcccgttgtatggcagggtcaagatcagaacacagcgaagaacccacatgctctttggggatcactgtccacctggcaccacttctgcccactgcctgagctggcactccacacacctgggatacaaccagtgtcctgtttctgcctttgcccccaaaagcccattgtccacacagtagccagaaggagcgtgggttgggggggcgggggcgggcattaaaagccaagccagccagtggctctcacctgagttagaaaaaggcaacgtttttataaaaaccaacgaggctccaccatcccctcatctcctgccacataccctttcacacaatccacttcctgttcctctaacgcaccggtcttcttactgttcctctaatgcaccgagcaggctccagcctcagggtcctgcactagctcttccctctgcctggatactctagacagccctgtagctccctctccaatgtcctttgagtgaatgttaaaatgccatttttttcagaggccttttccaatcaccctcacgaaaagcagccaacttcccttcccatccctcactctgctttaatctctccagcgcttcttactacctgatgtgctccatggccatactatcagtctcctcatcataagcaaagccccaccagatcaggtctttgtctatttagttcactagccatgtccctagagcctggcttgctgctgttgctcaaaaaacatctgctgtgggaaggcaaagggacttgttgcagccctgcccaacagttacagcctgtgtgcctcaagacagcacacgtcaggggaagccatctgaggcatctctgctgagggtgagcctccctccagacatcagatcaccaaccaagagatacctagcaagggagtggatggaataaagcagaggagaggggggaacaaagctaaggaaaagcaaggggcttgagggaggctgcagcaaagtggccacacctgtcccgggagcctcagcagccttcccagtcaacctcctgaggacatgaggttgaggggctcctggtttttctcagtcagaaaccgggaggctatacctgacttaaacctgatcccaaggacaaaatgtccagttagttactttttaagaagaaaaaagaaaacattccttcaatccccttggggctgctctcacaatggcaggcacacggcctgctgaagtaagtaaaagaggtctaaacctagctgtgtgccaggacaagctaacagtaaagatgacgaagctactggaggcagcagggaggcgccatgagaattccctggctcctaaaggcacttacttggcagcttacctttccaccacctccctcccacctcaatgcctgtcatgctcctaggagatgcttagctggtgatagtgaactttgtattttccctctggtaccacagaggtagtgcaggcattcctttgaggccttgctcatgctgtgctctgccagaaggtcacggaagtcaccagagggacccttgagagtgacatcaaggtgactgacagccattagtggcatttaaagcatccatgtggtaaaggtcagtctgtgctctgcacacctgtgatggctaaggggagattttggccaccttacttccacgcctctttctctggacccgtgcccaaatcagctgagtggacacctggcaagagctgactggatcaagagtgttcaccttactcaaactctccttctcagagaagtaacaatcagaatcacagccaagaaatctgagccagatactcaaaagaagacagagaagctggccatggggaggggggaggggggaggggggacgggggagcatgcaggggacttccaccacccaccagttgggagaagcagacaaacacaaatctctaacaggagactactgaggcagtcaggcaggaaacaaaacaaaacacaaaacaacaaccaaaaaacagagatgagaactagaggcatcatgattatttcttttcccttcttaggacccagtgggcttctgcctttgaaaacccctggaacctttataacctccaccttctgatcatgttcccccaagatggattctgttcccagtgacttaaaagccttaactgctacagatgagatctcccagtgcctacccactcctctcacgcccccacaggtctcaaacaggttattcctgggaggctggtgacaaagacccacgggaacaaagccaccagcctgctcgaaaacagtctattctgtgagcatgaggcagagctggcttctcactaaggcgtctttatagggcttatcaaaacgaaatcaaaaagaaagcttttgtcctaatgcatgccagggtcctgctgctgctctggaaacatgtgggtgcgtgccacccgcgagaaaaacacacacttcaagaggcactggaaaccctgatggtgttctgggtctcatgaccatctgttctcataggaaaaggctccagacatgctgtgtggggatatttcacaaagagacatggtgaagtgcggcactgcctacatgctggggtccagtcctgttggcagcaccagaacatgggcgagcatgaggggcagacgtgggagtgggacacatgctgccaagcaccctagtgtggctatgtacaagctagggtggggagggggtgcggcagaaggcagctcctcacggcttgagtcccaatctttgccccagttggctgcggaactgaatgaactgcccactcaccccagcactgtaaatggttactctcctcatccttccgatgacaaatcaccaaaaggatgcgctttcatctaccagacctcccaggctcaggtgctgactgtggcctacaaggacagctatctaaaacatcaaaagcactttccagcttccttcacggacatgagactgcctgctccccagaaagatgggtttcagtaactcctcctttggcagaatttttaaagttctagtccttaacttctacctcctgcccccatttctacccacggggaagggccacagaaataaaagggcatgggaggggggatgttagttgccttttcctctttccagtgaaagtcatttccctcaatagagggatccctccatgtttccatgatttggaagagaaaggtggagcttattcgtgagcaacttggccagaactgcccacagcctactacccaggaggaggaagaggaggagagggagtgggaaaaaaagagggaggaggagggggaacagaggaaagggtgggaaggttgagaaaggggaaggaggagggggagggaaggttattcgtatcaacaactgtggctacaccaatcactgccacccttgtgggacccacagccactgagtctccgccaactcagctctccccctcccccgcccccatacaaaccaggacaagcttgtaaggagaaggagtaagacagccccaaggcacacgactctgatgtctgaattctggctggggagggggaggtgtctaaaatttcctttggcttgtattatcactatgtattagcctccagatgcttatctttaaaatgaggacgagaaaagtctctacttctagaagagctgggggactaaattacacgtgcagctttcggtcagcctgagccagcgctgtcactgagccttggatttgtaagtggctcaaaagtaaaaagacggaagaaggccgtgcagctctacttcccccaaggccaggaagggccaaagcaatgacttaggaagtgggatgtttccccaccctaggcaaaggggcgaattccgagttccccggaggaagcagcagctctgcagactcggaattacctcgtcctcatctccagtgaagggagggatggaagtgggggcaggggcacagaaatggtacaaatccttcctaatggtccctggccagagctctgcccattcctgaaagtgtgaccttgggaaagtgagaccttgggaaagtgacttcgcctcgccaagcctcagtttcctcatctgtgcagcgggcataagggcagcatctaaggtgcagaaatgcttctgacgggtcagataacacctagcccgcagccgacgctcacagccgccgattcagacccgcccgggttccgcaagccccaggctgcccctgagccaccgcccaggcctcagcctcgggccatgcggacctcgccgccgccacgccccggaccccaggccccgggcccccaggcctcgacggccagccgcacccgggctgcggactgcggcccgggccccctccccgctgggcccccgactcaccggtgtagtgcaccacgcaggtctggccgcgcttggggaaggtgcgccctgaggagacagagacgggcatgctgagccgatgcgcgcggcggcagaggtactccgagccgccgcgcgccactactcaccgtctcctggggagatggtttccacctgcactcccatggcggcggcggacgctgagcgggcgggcggcgcgacgggcggcgtggaccaacagcgacctggcggcggttccacggctctgcctagtacctcggcgcgtcgcctgcgcacgcgcacgccccctcacgcccagccctgcgtgcgcgccccacacggcgcgcgacgtcccggaaacccaggcctccggaagagggaccggaagcccagaagccccgagacctccggaagcccggaggcctccggatacagctgtgtttgccgggtgacttgcttcgttctcctgcccttcctctgtgcttccagccggttaagcatctccctgcccaaagaatgggagtaataatagggggtccgccagtcactgactgggtgactgtcatcaggtttccacttagaagcacacagttactcatcctgggaagagcatggttctgagaagacagcgcacaggtggtggtagtatgttagtattttataagtggctcaaggttgtaagttctgcttttcttcactggaggaggagttgtccaaattcattcactcacccatagcttacatgcatacattcttattgagcatgtgaaagttgataatacgaattgggtcactcttcttatgcccaacggaatcagaatccaggggccaggggaaaagcactggaggcacgcagcgcctgctccaagaaccaatatttccactaactgctgcggaaatggcctgctgtccccctgagaccagattcagctagtaactgctgaaacaacccgccataacctaatactagttttacttaccactgtcagtcaccaatcagagcttgccagctccctgaaactttactagtgccaatgcatttccctttctaataaaacgcccagccttctctttgtttttcggacataccaaagaccaccagatctgtgtgtatgctccgagttgcgattctcgcttccccaaataaaacattacatttagagattcatctccatattttattttgactttgacaagcaccttctgtatgtcatgtactgtgctaggtgctgaggatacagcggtgaaggagtcagacttagtccctgacctcacagaatctacgtatgatgtgggagagataatcaaataacctgtttaagtaaaaaaagatacggaataaatgtaaagtttcaaatctgtaatattatgagacagtaatacatgctgtgaggggcgtgttaatataacagagatgcctcacttagtctggaatgtggtcagatatttccctgagttagccaggtttagccaggtttagccaaggttagaaggccaattgtgtgtatgtgttggggtaaggggaggcagaaggagcagtacctgcagaggcactgtaacgcaagagaacactgtgacatggtctaggacataaggaggcacatgtgactaatctttctctgatctgtgtgtgtgtgtgcttctgcattagtcgattctcacactgctataaagaatacctgaggctgggcacggtggctcatgcctgtaatcccagcactttgggaagctgaggcgggcagatcacttgaggccaggcgttcaagaccagcctggccaacatggtgaaacccagtttctactaaaaatacaaaaaaattagccaggcatggtggcacaggcttgtaatcccagccacttgagaggctgaggcataagaattgcttaaaccaggaggcggaggttgtagtgagccaagattgcacctctgcattccagcctgggtgacagagtgagaaccagtctcaaaaaaaaaaaaaaaaaaaaaaaattcctgagactgggtaatttatggaggaaagaggtttaattgactcacagttctgcatggctgggaatcctcaggaaacttacaatcatggcagaaggggaagcaggcatatcttacacagcagcaggcatgagagagagtatgtgaagaggaactgtcaaacacctataaaaccatcatttctcatgagaatgcactcactaccatgagaacagcatgggggaaaccacccccaccatccaatcacctcccaccgggtccctcccttgacctcaggattatagggattacaattcaagataagatttgggtggggacacagaactaaaccataccagctcctgtagtgttttaaacatgacctcacagttttttgacaccccaaccctcatctatgtcccctttcctaaaatctcagtgagctcgtgactgctttggaaattttaatgtagtaagaatacaggctgtaacagaaccaaattaactgtggctgaaaagaggctgaagttgctgtctctctcatgtaacagttcagaggcaggtggttcagtgcaggtaggacttcacaggctgcccagggactcatccttcttctacttgtggctccccatccttagaatcctaccctcatatgcatggtccaagttggctctccaacatattttcatctcagctagtgggaagggggaaaggaggaatggggggtacattcccttttcctttaagggtacgacttagaattgcacacatctcttcccgttatacttcacattgactataacttagttatatggtcaaatttagctgcatgggaggctagggaataaagtcttcattctgggtgtacacacacccaactaaaatcagaggttctgtgctcatagaatggaagaatggagatcgaaagatgaaattaaaaagagggccccagcagtcgccaggacactgcttcacaccacctagagaaaatcagactgcagcgagaataaatgatggagaatgagagcaaccaggggcgagagagttcctggattccgttttccctgaagcctagcagaataaggcttgcctcacattcatcctgtggtctctctcatggctctgaattgggtatcggttcaaaacatagacctgcctttgagacagtggccatctcaatccatggatataagctttgtttatatagatgggggttccccaagaacctcacatttgcaccacttcttcctcagtgctttgggaaaacacaggaaagcatgtagctatcagttctgccaccagacctaagatgaattggacctggggacaaggggcacttattaagcatttatctgattttttgaagtaactgggagagttcctttctaaattaatttagattctgtttatatatagcctagttattaacaactctgttaagtagttaagttctttgggatcacccttagcaaaccagaacaaaaaacagaaagagtgagtgactctaagagatggaactgggagaaagagcaggagattctgactttcatttaatatcattctgaactgattaaatttattttcactctctttgtgtaacaggagacagggaatcatttcagtctgaagtcataagcatccctcatgacaaggggaagtgactccctccctgaagttctaaaacctgaaaaatgggggttggatttcctttggtttatcctgtttgtggtttactcagcttcctgagtctataggtgtatgcctttcaccacatttgggaagttttcagccattatttcttcagatattttcttctgctccattctgtttctcctgttcttctcagatcctggtaacacgaacattagatattttggaattgtctcacaggtgcctgaagttctgttcagctccccccagtcctttttctctgttgttcagattggataatttctatttttctatctttgagatcactggcatgtttccctgcaatctccattctgctattgtacccatctgttgggagctgaaaaggccaaagggattgtgaccaactcagcattccactgaaggatatatgatcaaacagcaaactgtttatcatgaatgcaggatgtgggcaaactcacaactgcgcctgccgccaggaggtttgctgagggccctggcgccatgctcattgagattatctactgggacatctagatcctattgttcaaagactgcagtcttgcaagcctgctgtaaatcaaactgctaaccgacaatcaccccccacttcttgctatctcttttgcctaataaatgtgaagggctctaaagctcaggccccctgtttaccagaagcaaggagccccctgaccccttctttcaaatatgctctcttgtctttgtcttttattcccatgtttgccccctttgttcagtcccccaaggtctgtgcaggtgacaagtggcgacccagaacagggactccaaggatgtcggacacgtggcatctgaacacagggactttgaagacgtgaatgaagaagctctgctggagcagaggaattgaaattgacaagatgaacggggaccccaggatgagtctgctggcagcagatagaaggtcagtgccctaaagaggtactgggaacgatataaggtcagtgctctaaagaagtacttggaatgggaagttttctgaatcagggtaacatgaagcagaatttgtctattgaagaaaaacatcatgtgcagttgcttaaagttctgttgagacagtctggagctcaggttaattcgcaggcactaactaacctcctgcagaagccacaaaaggttattacgcataacccatggtttccacaggcaggcactcttgatgtggaaaattgggatagaccaggagaaggattaaaacaggctcatcaaaaaggtcctaaagttgattcttctgttttctccacttggagtctagttcgtactgttcttctgctatctccttattattctgctggacagcaggctgagtctaaaaaatctgaaagaatctgttgtcccacccacagctccaattgaaaataaaaaatggagagggaggataaaaattggcctacaccgccccctccagttgcagaaacatctgtaccgcctcctttggtagcagaaatagtgaccccaatacaaagaattttatgctctgctgccatagctaaggggagcccttaggaccttgtacttttcctatttctgtaagtgtaacgagtgtagctaataatggggtacagagcccattcactttaggattggtagaatctgcatttggtgctatgtgtcttctaccctttgatgtaaaacacttggctcaaacttgcttgtctgctagtgcatatctgacgtggtatttaaattggcaagaactgtgtgcagaccaggctagacagaaccatattgctggacatggagacattacagaggatatgctattgggtaatggcccttattcagacctggaacgtcaaatggcactcccagacgctgcttatcagcagtgtgcacaggctgctaaacacacctgggccacaattcctgaagagggagtcccagtactgtcctttttacatatcatgcaagggtcacaggaaccctacgcgcagtttcttgcaagattacaagaggcagtgaagcatcaaattcctcttgccactgccacggaaatgctaaccttaactttagcttttgagaatgcaaacgcagattgtaaacgtgcactggcacctgtgaggtgtacaaaaaacttttctcagagcttgtcaggatgtaggaactgagcttcatgggtcttcaatgttagcgcaagcaatggctaatctagcagttgacaaatctaaaaggagccaaggattaagccctaaagtaggaaaatgttataattgtggaaaaactggacattttaaaaaggaatgctgccagatctcaggacagaaaggatcttataatgcagtacccctccctccatagtggaaaacatgccaggactctcctcgctgtaacaaaggaaatcactggggtaatcagtgccgctcaagatttcatcagaatggcatcccccactgtcgggaaacgagaagggggcctggacctgggtccctcaaacaatgagggcattcccagttcagaccacaaccccatttcaggggcgggtcccaggagaaacattgattccctcattccaggaacacccagaagtgcaggattagatctcccagtcagagaacaggtaatgttagttggtggagacaaacctatcaaaattcccactggcatctggggacctttaccagcaggatacaggggactaattttaggcaaaagccaccttaacttgcaaagcattactgtagtcccaggagttgttgactctgattatgaaggagaaattcaagtagttttaatgtcacaagatctttgggtttttgaactgggagaatatatagcacaattattgcttattccctgcaaattatacccttctccactaaaggagaaacaaggaaataaagggtttgggagcacaactacacgagaaatctatttatcacaatctatagcctctagtaggcccacctgtgtagtacaaattaaaggaaagaaattttatgggcttatggacacaagagctgatgtgtcagtaatatccagtaaggactggcccccagcatggcctctcagaataactgccacatccctagtgggagtaggagcagctaaaagtgttcaacagagtgctgagatttttatcttgtcttggtctggatggacaatcatgtacttttcagccttatgttgaaaatatagctatcaatttatggctataaattgatagccatatcagtttatcgagatttacagcatgggatatgagacttacatatgaaaactttgataacccaggatttaaaatgttgaaggacatgggatatcagagtgggaaaggtttagggaaatccctacaaggaaaccctaacccgatatcagtaactggaaaggcaggttaaaccccgcagggagattcttctttagattccccgcggcaattaaccagaggcagaagttgagttcggcaatggcatgcctcccagctacagctacagaaacctttgatttcattatccctcagacaaaattttgcagttttataaagtccattctttcattcttcctgtgattactcatcacaagcttattccaggtggccagacttattttactgatggctcttccaaaggtcatgcagctatttatggacctaaacatactcaaacaataatgacctctggggtttcagctcaacactcagagttgattgcagtcattcaggttttacagctcacagctgcagatcctatcaacattgtctgtgattcagcctatgttgtgaatgtaaccagtcgcatagaaactgctacaattaaaagtactctagaccccgaactgcttaatttgtttcacttattctcatatgctgcctgctacatgccaaacaggtgagacagctggtcatgtacggccacattgtctgtcatcatttgctcatatggggattcctaaacaattaaaaactgacaatggacccgcttatactagtcatgcttttcaaaatttcttacagctttgggctataacccataaaacaggaattccttacatcccttgaggacaaggcattatagagcgggtacatcaaacattacaatgtatgttgaataaacaaaaagggggattaggagaccagttaccacctcaaacaaaattacatttagctttatttactttaaattttttgattcctggtatggatggtaagactccagcagaaagacattggcaagtgttagaggaaaagaggaaagtgtatccaaaagtgttatggaaatccccagaagaaggacaatggaaaggtctggtggctttactgacatggggaagagggtatgcttgtgtttttacaggagatggacaaactgtgtggttgccctcaaggtgtgtgtgaccatggaacaggagactggaggaacccagggtggccagccatgggcctggcccctccagtataggccatgagccagctgagcttgagtgcgaagatgcggagaaggccgaccggggtcacgacacagtcttaatgttacatttgtaaagaatatcaccactcaatttatggtttgtgggtttttttttttttggttttttgttttgttttgttttgttttttttgaggtggagcctttctctgtcacccaggctgcagtgcagtggtgcaatcttggctcaccgcaaactctgcctcccgggttgacaccattctcctgcctcagcctcccgagtagctgggactacaggcacctgccaccatgcctggctaattctttgtattttcagtagggatggggtttcaccatgttggccaggatggtctcaatctcctgacctcatgatctgcccgcctcggcctcccaaagtgcttggattacaggtgtgagccactgcgcccagcacggtttgtgtttttaatccttatgtctttctggcagctaaaaagcaccagctccaggtaaacaacacccaattgacctgtaaatcttgtcagttatatcactgcattaatcacagcacattgcaaacacagaatacctctactttgatcattctgggtcgcatccctggactgtggattcctgttcatccatccaagccttgggctgccacccctgctttacgctttgtgaaacatcttctaactcagcttactcactgtgtccgtagagccttaggcatgatcatttttactattgtttccttagtcacactgataacttctgttgtgatgtcctctgtagctttgcataattctgctcaaatggctcagtacacagagaactggacacagccaaccaagtacagccaaccaagtgtggctacttcagaataaaattaacactgagttacaaactgaagtgacagtgttgaaatccccatggttaggggaacaagtgcaaaggttacaattgcaacagcaattgtgctgtcattttaatcacactcatatttgtgtagccaacttagattataaccaaagtgagtatccgtgggaccttgtgaaagctcatttgcagggagctttcacatccaacatcacctttgatattggtgaattataaaacaaaattcttgatttacataggcaaactcaagagtttcagccttctttagaagactggaccgaattccagcaaggcctggagagcctcaacccttggacctatctaaggccccacattaacatcttatatgtagttcttggaataatgttgttttgtctctgtcttctgttcatcgtctgtgaaatccgttggactgccaattggaaaatgagagctgcccagcctggccttacgttctttcaattaattcataaacagaatgggggaatgttgggagctgaaaaggccaaagggatcatgaccaactcagcattccactggaggctatgtgatcaaacagcaaactgtttatcatgaatgcaggatgtgggcaaacccacgactgcgcctgctgccaggaggtttgccaagagcaatcactccctggcgccatgctcattgaggttgtctactgggacatccagagcctatcgtttgaagaatgcagtcttgcaagcctgctgtaaatcaaactgctgaccaacaatcaccatcacctcttctcactatctcttttgcctaataaatgcgaagggctctaaagctcagggcccttgttcactagaagcaaggagccccctgaccccttctttcaaatatgctctcttgtcttcgtcttttattcccatgtttgccccctttgttcagctccccaaggtccatgcaggttacaagcccatccgggaatttgttcttgttgttctcattttattttttagttctaacatttccactttattcttccttatatgttctattttatttgcttcaactttccatcttggctgagtgtggtggttcacacctgtaatccctgcactttgggaggatgaggcaggcagattgcttgagaccaagagtttgagcaacagcaaaggtgtgtctctaagctaaaacacctacagcctcaaaagcagaatgtgcattctgaaagggcctctgcaaatctgaagtttggaaacatagctgagatggatggggtctgaggtccccaaggtggaactgccaaaactcccaaccaccttcttctccctttgagctcctatggctctcttcttttactcaatggagaaaaccttctggatttgaagtatcaaatgtataaatgtctgacagtatcttgactgtatattttataccttaaagggtttaagaattctggttaagggacagtctctaatggtgaaatttcagacattcatcagtagatggagttgatacatttgagccttatcacagtcttaggaggctccaggaatcagagacatggtctccacttaaatgcccatatcttctcctcaaagaagcttccaatgggctgcccaggttctgcttgaatatctccactgacagggaagccactacctccaggagtagaagctttcacctttggatagtctgtgtattgagtgaaaaggcctgcgggaatggggattagaccagctcttgtgcttgtgggtggaagtgagtacatgaggccaactctgaaggtcctaaatttgatgggcagcaggagggggaggggagatgccttgctgtgtcagtatcatcagggtgtggctgggactgtctagtactgcacaaaacataaggcttgggtgaaactgtagccaaaactcttataaattctatggtggacatttggtgacatttgtcttttccggtaatagcactttggttttcatttggggaagcactccttctccactcttggccatgatgttcaagtggaactaatgcaacactcagctccaggagtggtcatgtgactcaagcccttaaatacagtgactgatttaggaatggacatgtcttagtccattctggctgctgtaacaaaataccataccttgggtgattcataaacaacagaaatttacttctcagagttctggaggctgggaagtccaagatcaaggcagatttcatgtctggtgagagcaagctttctggctcatagatggtgccttcttgctgcatccccacatatgaaaggagtgagaggtctctcttgggcttctttttataaaagaactaatcctgctgggcgcagtggctcacgcctgtaatcccagcactttgggaggctgaggtgggcagatcacctgaggttgggaattcaagaccagcctgaccaacatggagaaactcagtctactaaaaatacaaaattagccgaggtggtggcgcatgcccgtgatcccagctacttgggaggctgaggcaggagaatcgcttgaacccacgaggcggaggttatggagagccaagatcgcaccattgcactccagcctgggcaacaagggcgaaactccgtctcaaaaaaaaaaaagagctcatcctattcatcaggactctaccctcatgacctaattacctcccaaagtctctatctcttaataccatcaccttgtgggttagaaatttcaacatatgaatttggggagtgggacacaaacattccaactataactggctccacagtacagagcaaacagcagagctactggggccagacagagtgccactatggttgggttctgctgagggttctcttcctggcttacagacagctgtcttcttgctgtatcctcacatgtgagagataaagaatgggaagagctagagaaaaacgagagggagagtgcacgctctttgctgtctcttttctctaatcccatcatgagggccctaccctcatgatttcttttttttttttttttttttgagatggagtttcattcttgttgcccaggctagagtgcaatggtgcgatcttggctcactgcaacctccgcctcccagtttcaagcgattctcccacctcagcctctgagtagctgggaccacaggcatgtgccaccatgcccggctaattttgtattcccagtagagacggggtttctccatgttggtcaggctggtctggagctcctgacctcgggtgatcctcccatctccgcctcccaaagtgctgggatcacaggagtgagccaccgtgcccattcatgatttctaaacctcattacctccctgttgtgccaaacccttactgactccaatggggatggcatcaggttcaagaggccaaagaagagacctagagccagcaaatgagacatgaggttttatttggggcttacatacaggagagagagtccagtggtggtgggctggataggagaactgcggtacatacagtccagtggtggcaggctggatgggataaccacatggctcagtggtggtggcctgggcagaagaaccacaactgcttgtaaaagacatgcagtttatatagcattttcacttagcaccctcccccaacagtctccacctagcaacttcacctgacctaaaacaaaaggtctcgatcccctgtatggcccgcattccacaggatgggccataggttcctcatagactcagatgttcctcatacacaaggaaggaatctccaagttggctactcccagatttcctagcttggaacccacattaaggtgcgtctgccatacagagtcattctcagggtatacttaatttattgctattaggtgcatttatcatgcactcccaaaggccctatctccaaataccagtaccttggaggttagggttttagcatatgaatttaggggcaacatagttcagttcatagcaaaaagttaatccccaattcttctgggtgtagttactaattaaaagagaaccctgattatagtagagccagcagtgtcagaatctagatgacccttaagctttccactttatgggccaataaattctttttgctcgtctaaattgaattttctgccacttgcaactaaaagattcttgagtaatatgatccacaaactcgcagatcacttgatctccaaaggctgtacttgctgggtaatcagttgctttgggtgtgtgtgtaatgactgcaggaggttcttacacttaagccttcatcagaatcacctgcagaacttggtagagcccagattgctgtgcttcaaccccagttcctcattctgtaggtctaaggtgcaacttgagaatttccatttctaacaagttctgaaatgatgctgatgctgttagtctgggaatcccactttgaaaaatggtgaaatggaagcccttgcctcctgaaatgaggacacctggaatctttgtggcccaagattgagacaaggggtaggatgaaacttttctttagtgggaaagaaccattttggtatgtcctgggagtcctcaggaagttcagtccttactcttagctcccaaaggggaggtattacagttccagaagagattttcttagagatcctttaaaaatgtctgctgtgcctccctacagggcttttctattgcactcagaaaaaattcaggtgccttacaaggcatttcatgatctggctttgccggggaaagtggaagggatcagaatccttcattcccttgactcttctctcatgttctatgtcagtagctacagggcttatacatgctggaatttcctgggccactctgacagcaaggagcatttttcaggctatgagatgtagcaaaattaatcttcaaaataacaaaaaacacaccagctcttctcctcagctctctaaatgtctaggaaattcttattctgtgttggtctaagctaaactatatctctcagatgctttggagcccaaaaatagttcttagactcccaagtatgtactcagatatttggattgggaattgtgatcagtagatcatagtggctacaaataatgacccatggctttaggaggattcaccaagcagtgtgtaccaagggccaagacgggtcttaatggctccaggagatcaggaaagtggctcttcaccttgtagcaaggcaacaggaagctaactcaaccataagaaatgcagtgatatgtgttttgcctagagtggcttatgtaatccttatcccaacatcactattattacccctcttttacggaagggaaagctgaggcttagtgacatagaataacttgcctatggctacatgtggtagcttgaaaaatggcctctcaaaggtaccaggttctaatctcttaccttgcatggaaacggggcctctgcagatgtgattaagtcaaggatcttgagatgggaaggctgtcatggattagcagggtgggccttaaatgcagttgcatgtatataagaggaaagtagaggaagatttgaccccacacacacagaaaagaaggtactgtgactacagagatgagagatttgaagctgccgaccttgaagattgaagtgctgtgaccataagccaaggaatgatagcagccactagaagctggaagagccaagaacagactgtcccctaggacccccagagggagcatagccctggcaacgccttggttttgccccagtgatactgatttcagacttctggccttcagaattgtgaaagagtaaattgtggaagaatccatttcttttgttttaagccaccttatctgtagtaattttgtacaacagcctccggaaactaaaacacatacgcccagaaatgtgcccaagtctgtctggccccagtagctctgctgtttgctctgtactgtggagccatgcaggaggaaacaaatgctacccccaatgttctgcactaatagagatggagtgggcatgggaacccacataggaccattatttggcttgtgaacattgtgtactttttttttaattatgaagatttattttgctacatgtggagcctgaaaaatgccccttggttcaggcttctgagtaaccaagtgttgacctagtgggcccatagtggctggatactgaggaggggtgatgggcagggacaacttaggatgaggggtgtgctacagatgacccccagatgggacaatcatgttgatgtgaaagtgatattgtcagataggctaacagattctaagtagtatcagaagctgccaggttagcttgccactctgtcatcgatttagctggtaggaacacatcgagcccatatagattaagatgacttattacttacacagacaacaatggtattgctccccatggcccttgatcacaggatgacactggaacagaaggggccaagtgacatgcaacagaggtgatgggtccctgatgctgaggagccaattatatgctgcagcaaagcagctttacagcctgcagctgtaccctgaggggaggaggggaagtggacaggcccgcttcatcagaaccagcaaggcagatgagaaatggccatgacagtcttcctgtagatagagaggtgggtgagagatggccttgtggcagctcctggcaagctcacctgacttctcatgatctgggtgaccatggggtatccctccaagacttaggtcagcagtggttaagccttgccctgtagcctaggtaaaaatgtgcaaggttgtcagggcaccagcatggaggagttcccctacaaatatgagcccttcagagtgaaaaggcaagaacttagattttgccacttctttgagtcttcatttttgtatgaagactcgtgtgtgtgtgtgtgtgtgtgtgtgtgtgtgtgtgtataacagggtcttgctctgttgccaggttggagtgcagtggtgcaatcacagcttactgcagcctcaacctcccacgctcaggtaatcctcccacctcagcctcccaagtagctgggactacaggcgcacaccaccatgcctggtgaattttttaatttttttgtagagatatcgtctcactatgttgcctgggctggtctcaaattttcaggctcaagctatcctttcgcctcagcctcctgaagtgctgggattacagcagtgagctactacacctggtcccattttaaccatttttaagtgtaggttcagtggcataaagtacattcaacattgttgtgcaaccatcatcaccatccatctccagaacttttccccttccccagttgaaactctgtaccttttaaacaatgactccctgtgcccttcccttagctcctggcaaccatcattccactcactttctgttgctgagtacgttttttactgcaagctcagtactaacccctgcctccttgatattgctctgctttgtatatgagttgaatccttgaaggttgaatatgcacatgacacagttcatctacatgccttggtctcagcatgttctctttgactagaagagtctttaacagcacagccatgccttctgtttctctgaatcccacattccgaatgtcctgccatgctgttggtatagacaagatgtctgttcattgtgagttcttggtacctgatggtgaagttgggtagggcacagactttgctgaattcccatgaggtatctgagtccaaggctttagagcaggtcataccacagggaagggactttcccaagcaaattgctggttttccaccaaatccatgaggccgagcatgtggtcagttcccctgaaactttcatcttgattgcattctagatgacatgcccagcttgcttacattctccagccatgtcaggtatggccatgtgactaggttttgacaatggaactggagcggaagtgtcctgggactcaagctgaagacactggaccagtgtcttccactacttcctcctccttctagctggaactttgacacaacatcctaagttggggatcacaacaatgtgctagaggattgcagggccaccctcctcccaacctgggactctggatgacttcatggaacaagcctgcctacttccctggactgttatgtgagaggaagataatgctctgtcttgtataagccatttcatttcggggctagcctttgccctaactattacaaccacagagaaggctgagatagaacctggacctcctgactcccaggccatccctacaccatagtacaaggggtattagattggaggagaaagagaagtgagtgtggcaaagctatcttcagtggcagcaggagaaatgcctctgctcttgcctgaaggtactttctgtctgggcctcagccttaacatctcactcctggttgtttgcagtggcttcctacttggttttcctatttccagcctttcttatgctggctaaccctccttaccataatcagaacagtctttccaatacctatgtggtctctggaacagacatttcatccagtagccattcctttccattgtttcccttcttggaagagcctatcttccaagacagatggtgaaatattagtaatttgttctccagtgtcccttgcagcaaggattggccatgtagccaatgggacacattgacattgttgtatatggtaatttttatgtttaattttttaggtatttccaaagtggctctaccattttacattcccactagtgatgaatgagggttccaatttctccacatcctccccaacacttgttattgtttctcttttattatagccatcctattaggtgtctagccaatgagaactgtgggaacgtctgtcagaggactttggggaaagattttcctccttaacaaagagatatatggaacaaagacatcacaagaaaagaaaactgcagacaaatatcccttatgaataaagatgcaaagattctcaacaaaatagcaaactgaatccagcaacacaaaaaaagactatacaccatgaccagaaatgcaaggatgatttaatatccaaaaatcaatccataaaatacataacatcaatagaataaggaaaaaccaaacgatcatctcaacagacacagaaaaagcatttgacaaaatctaacaccctttcataataaaaatgttcaacaaactaggaataaaaaagaatttcctcagcctgataaagaacatctattaaaaaaccaacagctaatataatatttaatgattaatgattgaggccaggtatggtggctctcgcctgtaatcccagcactttgggaggctgaggcaggtggactgcttgatctcaggagtttgagactagcctgggaaacatggtgaaaccacatctctaaaaaacatataaaaattagccaggtgtggtggtgtgtacctgcagtcccagctacttgggaggctgaggtgggagggtcatttaagtccaggaggcagagactgcagtgagccaatattgcaccattgcactccagcctgggtgacagagtgagaacctgtgtcaaaaataaataaataaataaataagtaaataaaaaagattgaatgctttgttcctaacatcaggaactagacaagaatgcccattattactatttctattcagcattgtactggaggctctggccaatgcaataaggtaataaaagaagctaaaaggcatccagatttaaaagggagaggtaaaaccatttctatatgcatatgacatgatcttgcatatagacgatactaaggaatacacaaaaaactattagagctaataaacaagctcagcaaagttgtaagatacaatataaatatacaaaaatatttgtatacctatataccagcaatgaataatctgaacatgaaattaaaaaccaaatctctttataatactattgaaaataataaaataattagatataaatttaacaaaagaaatgcaagacttgtacactgaaaactacaaaacattgctggaaaacatgaaaatgtataaataaatgtagacatatactatgttcatggattagaagacctaatattttttaaatgacaacactcttcaaactgatctaaacattcaataaaatctttatcaaaatccgaatggcatttttagcagaaatggaaaaacaaattctaaaatggcagtagcttcttgttcagggctccttgttagtgagataatcttcctgtcttcactgatcctcctgaccttcacctgatgctgtcctatgtgggaaaatggaacactggaaagccaacacatttttttttctttgtctctggacttcactatcctagtaagtgaacaaagtcttgactattaatttcatttggcttattgtcctaactgaccatctcaacacctgtcatcttgacaatcttaaattattaaatataacaatcaaaagacagattggcagggtatatatgttgtttatgataaactcatttcaaattcaacaatttaggtggctgaaagtaagcgatataataagatatattatgcaaattttagtttaaaaaatagaagtggctaaatgaatatcagatacagtggacttcagaaccatgaaatttactagagtcaaagagggatattacataagaataaaaggatcaatccactaggaagacaaaacaatattaaatgtgcaggcaccaagcaacagagacttaaatatgtaaagccaaagctaataaaactgaaaggagaaatagacaagtccacaattacagtcaggggcataaacaacccaatctcaacaatcaattgaactactaggtagaaaatcagtgaggatttagaggatctgaacaacaccattaaacaacggtatctaataggcatgtataaaatactccaaccaacaacacagaatataattagtttcaagaacccaagaagtatataccaacatagacatatcctggaccatgaaagaaacctcagcaaatttaaaagaattataattatagagtatgttctctgacaaaaatggaataagcctacaaatcaatagcataaaggcagaaaatctctaaacatgtggaaagtaaacaacatacttctaaataatctatggctcaaagaagaagtttaaagggaaatttaaaaactacataaaaccaaataaaagtaaaaatacaagatatcaaaatatgtgggatgcagcaaaagtaatgctgagaggaaaatttatagcactaaatgcttaactagaaaagatgaaaggtctcaaattagcaatttaagttagtacctctagaaactagaaaaacaagagcaacataaattcaaaactagcataaggaaagaaacagtaaaattcagggcagatataaataaaatcaaaaacagaaaaactagaaaaactgcaaaaaagctgatttattaaaaaataaataaaattgataagcctctagcaagatggaaaacaaaaagaagatacaaatcactagtaccacaaagaaacagggaatgccaatatagatcttgtagcctttaaaaagataataaggaaatactgtaaatacattgatgctcataaatttgataacttagaagaaatgaaacaattcctaaaaaataaaaaaaaacttccaaaacccaaccaggatgaaacagatagtttggtcagtcctaaaatcattaaaatggccaggcacggtggttcatgcctgtaatcccagcactttgggaggctgaggctggtggatcacctgaggtcaggagtttgagaccagcctggccaacctggtgaaaccctgtctctactaaaaattcaaaaattagctgggcatggtggcagatgcctgtaatcccactactcaggaggctgaggtaggagaatcacttgaacctgggaggtggaggttgggagccaagatcgtgccattacactccagcctgggtgacaaagcgagactctgtctcaaaaaaaaaaaaaattcattaaaataactgaattcataattaaaatgctccaagctggataattctaccaaacatttgaaaaacacaacaccaattttacacaatctcctccaaaaaatagaagcagaggaaacacttctcaattcatttcatgaggccaatattatgagacgaaataaaaagaaagaaaattacagaccagtatctcttattaattctgatgcaaaaatccttgacaaaatataagcaagccaaatccaacaatgcataaaaataattattcaccattatcaagttagatttattacagctatggtagttcaacattcaaaaatcaatcaatccaccatatcaacaagccaaggaaagaaaagcatataatcatatgaattgatgcaaaaagaaagcatttgacaaaatccaaaactcattaagtctcccagcaagtcataaatagtgcaaaattatttcaacttgataaagaacatgtaaaacaattatacaaaacaaaaaaatccacagctaatatacgtaatggtgaaagactgctttcctcttatgatgctttcctaatggcgctttcctcctaagacggaaacaaggatgttctgcctcaccgctgttattctacacgatactggaaggtctagcccctgcaacaagggaagaaaaagaaataaaatgccccacgtcacaaaggaagacagaaaactgtactatttataggtaacctgtttgactatgtagaaaatctagaggaatttaaaatgcaacaaacaaactccaactaaaaagtgagtttacaaggtcataagacactagataaacacacaaacatcagtgacatttctatacactagcagtgaatctatggaacaaaactttaaaccacaataccacttataatctctccaaagaaaatgaaatatttagcaaaacatgcatagcatatgtatgctgaaaattataaaataccagataaaagaaataaaagatataaataagtaaatgaaaatacatactgtgtttacagattggaagtctcaacatagtaaagatatcagttttccccaaatttatctgtaggttcaatgttcatatcaaaatcccagcaagattttttgtagatatagataagtttattttccaatttataaggacaggtatagtctctagaatagctaaaataacctcaacaaagaggaataaagtggaaggaatcaatctactcaatattaaggtttactttatagctacaataatcaatacagcttggtagtttcttataaaactaaacatgcaactacgatatgatctagcaactgcactcttgagcatttcagagaattgaaaacatgttcactcgaaaatctgtacacctatgttcacggtagctttattcataggaactaataactagaaacaacccagaagtctttcagtgggtgaatagttcagcaagctgcagtatatatatgtcattaaacactccttagcaataaaaagcaatgaactgttggtatgtgcaacaacttggatgaatctgcaaggaattatgctgcgtgaacaaaagccaactgcaaaaggttacatactgtaggattccattaatatttactccacaaatatttatttttgcaataataaaaattttaaaatggagatcagattagttagtggttgtcagcgcttaaggatgggtagggagtggctgaaggaagaaaacgggatgcttatgaaaggataaagtctttgatatctttgtgatgatgaaggtatctatcgtgattacagtggtgaatacacacacctatgcctgtgataaaatttgcatagaactaaatacacaccacacacacacgagtacacgtaaaagtgggaaaatctgaataagatgggtggattctatcaatgaaaatatcctggtcatgatattatactacagttttgcaaaacgttatcattgggggaaactaggtaaagggcatatatgggatgtgtctgtattatttcttggagtctgtaattatttcaataaatattttaattaaaaaaagaagcaaaatacatctgcctactttctgatccagtaaatctgcttctagaaatatattgaatggaaatatttgcatgagacagggcaatggaggtggggggaagggttagattccaatcagtgttgaagctggagccaccaggacttgccaaggaattgagagtatccccgtgtctctgacccagtctcctcacggtttcccggcttcactctgccacatctaatccatttgccatcgtgtagctgagatgatcttctacaaattcaccctgaccatgcacctccctgtagagccttctatggtcccccactgccctcaaaagccagcattcttttccctggcataggagatactttgatctggcctctctgactcatgctcagtcctgtcctgcagctcccctgactcattgcattccctcttgacacgaagcctgtgcagatgctgttccctcagcctggaagacctcagtctgggtgactcatgctcacgctttaagtccctggtcagacagcacttcttccgggaagccagcctgaccttctcagcagggttctaagacccatatttcctgcctaatcacagccttttgcaaaagtgggtggtagttgtctcctcactggctaggcacacagtaggggctcagagtgtgattcctccaagtagaggggctccctgttgcctcaggactaagtccagattctgcaccatgttcaggagatcctgtagcgtctggcctctcctgacctcccagccctggatctagcccccatctctccacaactttctttattcagcctgttggcttttaatagttcttctaactctcctcatggtcttctctcaaggcctttgttgatgctgtcttctctgcccagacatgcctccttcttcccattttcacctgggtacctccaactcatccttcccacttcagttaaaacatcacctcctccaggaggtttccctgactgctggggccaggtgaaggcctctgttatgacctttcccatggtactctgtgcctcctcccttccaatgcacatcgtactttcatttattattttttgcctgtaattacaccggaatgtgaaccccatgagggcagagcaatttatgtcttgctcactgctgaatagtgcctggcacctagtaggagctcaggacatgtttgttgaataaatgattaatatccctcctgagagacaaatgcaggcatgtggcttgcccagttgaccaggggcctttgtgaagggaacagcaattctgggcaccaactgcatgacaggtactctcgagaccccacttattcctcaccatagccccttgtgataagtttatcatccttattctacagatgggtaaactgagctccaagaggtgaaataacatctgtagaatcactgctggtaagtggggagtcaggatttgaacccaactctctggcctttgaaattggtttcttactacaaaaaagcactgcctcttggtggtaagaaaccaactggtttttccagatgaccctgggagctaagaaaaccaatgcttcttgcatgcccgttctgcgccagacactgacatgctcatcttgctcaggctcaccacagcgctgtgcggtgggaattagaggaggagcctgaagccctgagaagcaaagccacttaccgagatcacatagctgagaagagctgagccaggatttaccccagggtgttctgactccaaggctggtgggctcaggcagggtggctacacattggtgccacctcccacttcctggacataccagaatgatgacaagaggcactggaagctcccacctaggcctgcagggttactacagaaaaagacaaagatcctttgagtcatctgggtgagaaaaggcagggaatgacaggcacagtgtggtgtgctagtgatggcctgtgcacagatggggctttgccagtccctttgcagggtggagataactgaacctggagagagtatggatttgaaaccctgtccccagcttgcacagggctgcaaatcacagggttatacgtgtttcctgccttcctggtgtgaaagtggctgaagagattgtgaggccagcctcagttttcccatcccagaaggggaagatgcccttagaagttgcccctgcccttctggagaccctcttgagactgcaagattggcctcaaggaagaggtcatcaggtctttgccaattggtccctggggcccagagaggggcagaaactagcccaaagtcacacagggatgcttggctgacccagaattggggcaggctttggaatccccacccagtgctctttttgctgcctcaggctgcacttatgctacccccttccacttggaaagccaaggagatgaacaagaagccactgagtctaggggtgatggtggaggatgtgctggaggctgggaaagagagtagtgaggatgctgccagggagctgaggagccagggaggggagggctgtcttagttatgtcaggttggggtctgccacgcacctgtcatctcagtctcatgctctcatcttgaaggaacagcacccagattttcctttagggagtcccctcccaactgcccctaagtccactccccatccccagcttcaaggctcagcccatcagtaaacttcatctccctggctacagtgattggtttaggcagcgtcatatgactccatttgagcaatgagaggcagctctgggattgttgctggaacctctgtgaaagcagaggaagctggaaaggatgtaatacagtagctgctgatgatcatcttgccaccataggggtaagtcatctggcaaagaggtcaagataatgctagcagggttgagagcctgaggcaaggacagatccctgaggacactgtctggacgtctgacaatgggtcatcctggctgccctctttcctagcctgcagcacatcctccaccatcagccctacatcctgttactcaggcacccaaccatgccggaacagctatggaatttccagttttgtgaaccaatatactctccctttggttaaggcagtttgagttgtgtttccatcatttgcaattaaaagattcctgctacaaagccctcatggatctgcattttttctcccaggtctcttctaccactagagagttgtggactcttggcaaaggagttaataacactactcacaattcatgtcttcattcaataaatattattctttacttcatatgttccacgctctggttgttttgtggggagcaaaagagaagttcccatttctgtttatgttagaaacaaaacaagacaaaaaacaaattaacaagcaaatacatactgattataaaataatgtgatgtgaagaaaaaaactgctaagaaagaataatgaggtaggagggggctacttgagatcaggtggtcacgctgagagttgagagtggaaaggagcagctgggaaggtgtctgggagaaggctgttctaggaggcagaaacaacatgaaccagaagcttgaggaaagactgttcactagaggaacagaaggaaaaccagggaggctggacaagaacagggatgggaagctgactagagtgtagagagaaaactaggaagacctcatagggccttgtgggtttgagtgtaattcaaccaaagaagccactgttcttgcctcctctctcatagaaagagaactcctgatttacttatttttattatttttttaaacggttaacttttattttagatacaggggctacatgtacagatttgttacatgggtatatggcatgatgctgaggtttggggtatggttcccatcatctgggtagtaagcatatagttttttcacccacgccccttccttatttctctccaccagtagtccgctgtgtctactggagtgtctgttgttgccatgtttatgttcatgtgtgttgttcccatgtttatgtctgtgtgtgttgttcccaatgtttaactcccacttataagtgagaacatgtggtatctggttttctgttcttgcattaatttgcttaggattatggcctccagatgcatgcatattgctgcaaaggacacgatttcatcctattttatggctgcatagtattccatggtgtatatgtatcaagttttctttatataatccactactgatggcacctaggttgattccatgtctttgttactgtgaatagtgtggaaataaagatatgagtgcatgtgtccttttgatagaatgatttattttccttcaggtatatacccagtaatgggattgctgggttaaatggtagctccgtttgtagttctttgagaaatctccaaactgctttccacagtggctgaactaatttacatttccacaaatgtaacagaaaggcccaaaattaacagtagataagactttatttctctcagggagaaaaaaaagtcaacgtataaagcaactctttataagggttctcttttctttgcagcctcgccggcatctgttgtttctgacttttaataatagcaattctgactggtgtgagacggtatctcactgtggttttggtttgcatttctctgatgattggtgatgatgaatatttttttcaagtgtttgttggccacttgtattatcttcttttgagaagtgtctgctcatgttctttgtccattttttaatggggttattgtttttctctcatttatttgtttgagatccttatggattctgggtattagacctttgttggatgcagagtttatgagtattttctcccattctgtagattatctgttcattctgttgagaatttcctttgctgtgcaggagctctgtggtttaattaggtcccatttttcaatttttgtttttgttgcaattgcttttggggactcagccaaaacttttttgtgaaggccaatgtcaagaagggtacttcctaggttttcttccaggattattatagtttgaagtcttacatttaaacctttaatccatcttgagttaattattgtatatggtgaaaggtaatggtccagttttattcttctgcatatagctagccagttatccatcccagtacaatttattgaatagtgagtcctttccccattgcttgttttcgccttgtcaaagatcagatggtttatagggtgtggctttatctctgggttttctattctgagaacccctgatttatatttaggcacagaggacctctgattatggataccatttcccagactctcttgcagctaggtgtgccatatgagtagatactggtcactggaatgtgaacaagtgtgaaatgagtaacatcagggtccttcctgtaaagagcagagaaatacccactttgtcctcttttctccctagaatagctggcatgcagggatgagccagagccatctcagactgtggcaggagggcaacaccttaggaatggctgagcaacaagccagacagagcctgagctcccaacagtttcatggaagagatgcttcataggttgactttttttctccctgagagaaataaagtcttatctactgttaattttgggcctttctgttaatgcagctgaaattatatagagatgtttaaaactatgggttaggatgagaccacccaggacagtagtcctcaaactgtgttttcgggagctctgagaactctgagtgtcattgagatgctatcaggggtctgtgaggtcaaaactcttttcctaataatgctaagatgtgtgtaccttttacactctcattctctcaccagtgtatggtgcagctttccaggagctatgtgcatgggatagtgcaacacggtgtatgcagatgtgtatgcagaagtagtatgaaaatccagctgtctttttttaaagccagacaatgcagggattcacaaaaatgtaaaacaatgtactcttcttacgaaatgccttttgtttggaaatatggtcagttttgaaaacagattatatttatgttaacatgtaatgcattcacaattttaaaattaatatttttaacttttctccattttactaacataaatattaatagatacaaacccacttaaaaagctctttcagatcttcaagaatgtttaagcatacaaagaagccccgagaccacaagggtgagaactaccatcctccccgctctccggatgctcccacagcctgggctccccagtgcaggtagggactccccagagcatgagaccacccctgcctctcttggccccatgacccccctcttacctaactgttccttcacccccagagccagcaccaagcaggagatgcagtacagtgtgcccaggaccatggcagccatcacatatgccctccactggggaacaagaagtgcgttaggctgatgtactccactccacctccatacgtgtttgtgcagtgacaccagcctggagggccttctatcgccatctccctcctctgtaaatcctacccactctttgagtcttggcccaagggctgctgtctctctctctctcaaatgatttctgtgttctcatttgtctctgccttctctgggaatctttggtgccacagggtaatctcctgtgtgtcactcctgacttcctaattcatctgccatctccttccttgaaagcggaaatagtgacttcttctgcttccctacattgcctaataacaataacaactaccataataatacttgctaacaattattaaacagtcaccattataatattagctcatttactccttgcaacagctctctaaggtgggctctatgatattagcctcattttacagatgagaggactgaggctcagaaaggttaaagaactgcccaagccacacagttcagaaatggaggccagcatataagccagttcaactctgattggcgactgctagaaatcaatggagtgatatgcacttagcactgtgccggggggatagaaagtgctctactacccagtaagcatttattgagcacctactatgtgtcaggcactgctaggtgctgtgggttcagctgtgagccaagcaaagtcccttctctcctcgtgcttgtaggctgttcctgcctaagccttccctctgctgttccctcagcttgaaatgttttccccaggttcccacatggcttgctccatcacctcctttaggtctctgctcaaatatcaccttatcagtgaggcttcctctgacctcaccacctaaaatctcaacttgctctgcccttccctgcagcacatcctgcccgatgcctgcatgtgctatgggcctcactcactcatgggtaatatctgtttcccctgcaggacgtcagctctgtgagggtggaagatgtgtctgtcttttccctgctatagcctctggcacagcatagcacctggtatacagtagatgctcagaaaccatgtgccaaatggatgaatgagcatggttggtggtgaaaattgttatgaggaagaatgaaggtagtcaaaggggatggggtctgggggtcatcttccagagagggcgtaagattggagacctgattagagcgtgtggtgggggggagtggggtcggggggaatgtgtcatgtaaagaactgggagaagtgtcttccaggcagaggaaaagcatgtgcaaaggccctgtggtgggagcatgcaaggcatgtctgagaaacagaaaagaggctggtgtaagggagaagggtgggaggtgagggagaagggccgggggccagcttgtccaggtctttcagaccatgctgagggatctgacgtttcctgagggtgatggggagccatggaggagtctacagacattagctgttattactatgtttcaagggcccacatgggccaggcccaggtaggccgccttacacacacacactcccatttgatctgtgtgtccatgctgcaggctttcctgtccccttttcacagacagggaagcagaagccagcaggcccctctttactgtgttctccagagagttggtgagcaggaagttgctgttgccatcaagggagccattgtcccatgagccattgaactccacggagccctagtttatgctgctgtggaagtggctccccagctttccctagatgtgggctcctactagcatgctgacagcttccatacctatgcctgcggaggcgacttaggagaccagcggacttactttctggtcccaggatgaagtaaagaagccagcagatggtgccaaaggcaacctctatttacccttgctgctcattagcataagacactcccaccagtgccgtgacagtttacaaatgccatggcaacgagctgcaagttaccacccctttccatggcaacaactcggcatttgttcttttctagagcattctgaataacaaacctcttaatttgcatgtaattaaaaacttttgggtctggtaaagatcttaaatgtttttagcacacacacacacacaaatgtaagtgggtgaggtgacagatgtgttaactaacacgattgtggcactcatttcacaatgtatatgtatatcaaatcagcatgttgcacaccataaatttacacaattttgtcaatcatacctcaagaaagctgggaaaacagaatcataccacaaattcactgttttagaacatgcaattaagcagttttagtatatttacagaactgtgcaaccattatcactactaattctagcatattttaatcatcccaaaaagaaaccctgtacccattagtagttactccccaatcctctctccctctagtgtgtggcaacaagttgtagcatgtatcactacttcatttctttttatggccaaataacattccattgtgtggttacaccacattttgcttatccatttatcaactgatgcacatttggattgtttctaccttttggctattgggaacagtgctgctgtgaacagcctgtgtacgtttttgtctgaacacttgttttcaattccttggtcatatacctaggagtagaattgctggatcctatggtaactctgttatcataactttttgaggaactgccaaactgttttccaaaagggctgcaccattttacattcccactttcagtgcaggagggtcctaatttctctacattttcaccaacacttgttgtctatcttttttatcatagctatcctaatgagcgcaaagtggtgtctccatgtggttttcctttgcatttaaagattactaatgaatcagtctggcgtggtggtgtgcgcctgtagtcccagctacttgggaagctgaggcacaagaatcactggaacctgggaggcggaggttgcagtgagctgagatcttgccactgcactccagcctgggcaacagagcaagactctgtctaaaaaaaaagaaaaggaatttagtactactaataagcacattttcatgctgatttgtttgttttaaagatgccaaagatctagatgggtttttatgtgtgaaattttctgattttaaaatgttggtcccagatcatggggtgttcagagcagcaggctcccatgctggagggccacaccaccccctggccaggcctgctcagcattggcttatgtttggcccatgtttgccaaccacctccttcagttccctgttgttccctccatgtcagtcactttgaatttctcccattcctcacacatagcaagttcttttccaccccagggcctctgcacttgctgttctttctgccaagcacactttctccccaaatctctgcttggttggtttttcatgttgcaggtctcagctcaaatgtcaactcctcagggttgcgatccctggctaccctaacatagccccaaaatttgctgctagtaactgtcccatttctatttcattgtcttcagagaactattggcatctgaaattaccttgctgtgtatttatttacagctgtccttagttatacacagaggattatttccaggacctcttgtatatacacaaattcacatgtactcaagtcctttagtgtttattggagtccacggatactatatttctttctttcctcttttttttttttttaagagagagggtcttgctttgttgcccaggctagagtgcagtggcatgatcacagctcactgcagccttgaactcctggattcaagcgatcctcccacctcatccatccaagtagctgggattacagacatgagccacagtgcctgactcagatactttattttttatttacatttggttgaaataaatttgcctataagtggaatcacatagttcaaacacgtgttgtttaagggtcaactgtgttcatttactatctatcccactaagatataaactgtaagagcagaaatcatgtctcttattccctgctataacttccgtaccctgcacctagcaggtgcttaatacatgtttgatgaatgagtaaataagctacaaatgaggaaaatgaggctttgagatgttaagtcacttgcccaaggtcccacagttaattagtggaagagccacaacaggaaaggttttctatgtgcagatcctgcagcccaggaaggagagacttgcctgagtctaatagcaagtcagcaagaaaacaaaggccgccaaggtctttccatgggctgctgaatgaggttggcactgggtgcctgtcaagctccaggggcctgtctgcagtcggtctcagctgagggagaccctccacctccagggactcagtcaacaagacctggctcctctagaagcctccatagatgaagggccccctggaaatccccagagagatttctggaggccagaggtaggaggacaattcagcatccagaggagaaaggattttctaacaggcagagcagcagtgatggaaggacaggtggcaaactccccattgcctgagggagataagcggagatgagtatcaggaggggaccagctccactcagctctgccacatgttacactcaggaaagaggctgggggagcactggcaaaactcaggagaggaagaggcaccagtgcccagtctagtgcacgtgacatttgactgaatcagtgggactggtgggagcaatgataatgcagctttattttgacatcccagtgtccacacaccctgatgggtgaactggaatcttcacaggcactgagatggaatctagggcaggtcccagtgactctggtaattgaaagtcttcctgtcactttttcccctcaaagagcttcaattcatctattcataaaaataaatttctgcaatgataaaaatgtaccagaagcaagtcaaaagacaaaaaacagaataggaaaaaaaattgtgattcatatctcaaagtgtatgtctccctgattctgagacattagtttcctatacataagtgaacagaggatataaatagaggttcacagaaaagaggatgcaatggcttctgactgcacgaaaagatactcaacatccttcataatcagggaaatgttaaggcaaactatgatggggtcagatctagttctgggcaagatggagtaataagcatgttccaccccacctctcctgctgaaggcagctataaaacctggacaggatgcacaggccagctatgtgaggactctgaaaagtaaatggtagaaggtaacttgaagaagatcagaaatcaaagtaccatcctgagtttacctttttgcccccttcttgtttcctggctagaacaaaatgtagcctggaagtggggactgggaccacacaggaaaactccagtagaagccctctagtgctggcttaaggaccaggaatttctaatgccactctcctgccctgagtttctttcttcttcctgctctcctatgccccagccaccagggagtccctggcaggaatgacagaggcctcaaagcattgggaacctgcaggagctgaaactcagagggaggagaatgttcttcatgcatcagcagagttgtgatcccaaaaggaagggagcaaacccctgttgctttttcttctttgtgctcccaccacctggccctgccatgaagagtgcagcacagcgggatgctgcagctttagctttctggctgggagcgtgaaaagggagccccaggaaacaggaaagtaccagggagattgtaaaaagggaggagcttgtgaaagcaaccccattacattgtttacgaactccttgaggcactctccaattgcacatgtgtggatctgattgtaatcaccatataaaggctctgagaaatgtgctaacaggccacatgctcaggtcccagactccctgctgggtagtgcacacagggtaccagacagtcagcaaaggctttgcagactgagctgacattggaaccaccacacacagaaggttgggacttgaggcctgaacctgaccaggttgactgccagccaaaacacaagatataaatgtttcccatagaacttaaataagacccagagcctcaaaatataatacagaaaacgttcaggttacaatcccaaactactcagcttgtgaagatccaggaaaatgtcaactctcctgggagaagacatcaacagatgcccactcctagatgacacagatgttggggttatctgataccttttgaagaaattactacaaaaatactcaaatgagtaagggtagatattctctttttcttgagataaaattcaagtaacaggccgggcgcggtggctcacgcctgttatcccagcactttgggaggccgaggcgggtggatcatgaggtcaggagttcaagaccagcctggccaagatagtgaaaccccgtctctactaaaaatacaaaaaattagccgggcgcagtggcaggtgcctgtaatcccagctacttgggaggctgaggcaggagaatcgcttgaacttggagggtggaggttgcagtgagccaagatcgcaccactgcactctagcctgggtgacagagtgagactccgtcacacacacacaaaaaaatcaagtaacataaaattaatcattttaacagggcgtttagtatgttcaatgttgtgtaaccagtacctctatctagttctaaatattttcgtcaacccaaaataaagcctagtatccattaagcagtacttcccattgtcccttccacacagcacccagcaaccatcaatcagctttctctctctatggatttacctattctggatattttatataacatgtagctgtcatagtatgtgactcttgtgtctgagttttcacttagcataatggttttgaggttacctagagttagccaaactgcaggtaacctcaaaaacattgtgctaaggtagggtcttccagaccaccaaatttgactcccaagactctgacacaaatttcaagttcaaggggttcctaaaaccaccctcaggttgtataattcaccagaaagactcgctgaaacctattatatgtacgtctatgtttattacaacaaaaatatacaaattagaaccagccagaggaagagatgcataggatggagttgggaggggtctaaatggggagtgtccggtgtcctctccccagggtcatggacagttacttcctcgtgaccatgatgtgtgataacatgcacagagtattgccaaccagggaagctcacctgaactttggtatctagagtttttaatgaggcttcactacatgggcatgattgattaaactcaatcttcagcccactccaccccaaccctggaggttgggttgaaagctctcacagtaaattctatgtttggtttttctggtgtggccagcccctccaccctaagactatcaggtgtgagtggcgttatgaataatctcatcaacataaactatcaggtgtggtcccagtgactcaacaggaataaagaggacactcctgtcatgttggaaattctagacatttctttgagtgaggccaaattccttacaacatggaagtttatccattatagcatttatcaatacttcattacttttttgtttctgaataatccattttatgtgtacacgatttgtttattcacttgtttattgctggacatttgggttgtttccacctttggggtattttgaataatgctgctattaaacatggatgtacaagtatctgagtacctgttttcaattcttttgaatatatatctgggatgtttaactttatgcattaatttgactggattatgggatacccagatctatggtaaaacgttatttcagagtgtgtctgtgagggtgttttctagattagtatttgaatcagtggatggagtaaagaagatcatcctccccagtgtgggcagacatcatggatgaacttcggtgttgaaggcccattaaaatagaacaaaaatgtggaggaagtgcaaattctctctctttttcagctggatcaccttctcctgctctcagacaatggagctcttggttctcaggcttttggactctaaggcttatatcaatagcctcccacccccagattctcagaccttaggccttggagtgggagttacaccactggcttccctgattctcaggctctcagacttcaactgaattacatcaccatctttcctggttcttcagcttgtaaatagtatgtcatgggacttcttggcctctgtaattgcatgaaacaattcccataataaatcttctctatatgtattgcattggttctgtttctctggagaactctgactaatataattcctaagagtggaatttctgggtcatatgtaattctatgtttagctttttgaggagccaccaaattgttttccacagcaacttccaacagtgacaagggtttcttttttcttttataggttcagtattctttattataaacaatcagacaacagtgtaagtgtgcatttgatggataaccgaagccaagttattataatagaaagcatgacttcgctcaaatagagtttctttgttgttgttgatctgttttacattaatttgaatttaacatatgctaggatcacctaaatttgtcatacagttctgctattaaaattgtaacagggaaagacaaaatgtgaaatgcatgttatattttgctttatttgttgaatatctatctatctatctacactaaatatttgggacacattcagagttaagcaggtgcttaaagtctatcaagtgatatttataaaatgtttttgttgctgttatgggaacatccatatccttagaagccaataaaaaagaggattctaaatgctaggtggttggctaaatgttcctgatttatactgagtgtaaaacaaaataaaacaaaacataaggtatatgtgttaagtagtgacatctacatagttccaaagcactggcaactattaaaatatcatccagctaaaacaaacttttcacaattttttttaacagaaaaataataaaccaacaacaaaaactggtaaatgttctgggtcttgtgagcagaccaaaatgttactacagtgttctctattgtgtgatcccagtgtacaagtttctatttctccatatccttatcaacatttgctattttccatgtttttgattatagttatcctagcgggtgtgaagtggtttatctcttgcaggtgttaagtggtatcccactgtggttttcatttgcatttctttagtaacaaatgatgctgaacatgctttcatgtgcttattggccatttgtatgtcttctctggagatatgtctattcaggttctttgcctatttcttaatttttttttttttttttgtggttgagttttaagtgttctttatatattctggatacaagtccattatttgcaaatactttctctcattttgtgggctgtgtttctactttctagataatatattttattgtgcaaatggttttactttttatgaagtctaatttatccatttcttccttttgttgctcatgcttttggtgtcaaatctaagaatccattgccaagtctgaggttataaatatttactcctatgtttttctctaaatagtttacccctatgttttcctcttgtatttgggtcattgatccattttgagttaatttttgtgtatggagtgaggtacgggtccagcttcattcttttgcctgtgattatgcagttgccccggcactgtttgttgaagagactattctttccccattgagttgtgctgaacacttattgaaaatcaattagccatagatatttatttctaggctgtcaattatattccactggtgtatatgtctgtccttatgtcagtaccacactggtttgattatagaagtttggagcatgtttggaaatctggaagcatgagccctgaaactttgtgtttctttttctttcttttttggtgtgtttctttttcaatagtattttgactacttggggttcattccagttccacataaatttgaggattagtttttctatttccttaggaaatgccattggaattttgataggggttgcattgaatctgtggatcatttgcaattaatattccaatacatcaacatgtgttgtcttccatttatttaggtcttctttaatttctttcagcaatgttttgtagttttcagcatagaagtctttctccttggtttaagtattttactcttttggatgctgttataaatggaattgttacttaatttcattttcagactgttcattgctgatgcatagaaaatggactttcgtgcactgatcttgcaatctgcaactatgttgaatttgtttattggctctagtagttgtgtgcattttggtattgttatattttctatacatagaattatttcatcttcaaatagagataactttactgcttcctttccagtttggaggctgtttattgctttttcttgcctaactgctctggctaggacttccagtacaatatttaatagtagtggtaaaaatgggcattcttgtcttgttcctgctcagtggggaagcttctgctcttttaccattgagtataatgtgagttgtgggttttgtgtaagtgacctttatcatgttaaggaagttctctgtattctgatttgttggtgagtgtttgtatcctgaaagtgtttgaagtgttgaattttgttgcatgcatttaatgtatctattgtgatatcatttccctctttacagagttgtgttacattgatggatttttttttttcttatgttgagccacccttgcatttctgggagaaatcccacttggtcatgatctataatcctttgaatgtgctactggatttggtttgctattttgttgaggattttttgagtctatattcataagatataccggacagtcgttttgtctgcctttgatatcaaggtaacggtggactcatagaatcatacctttgatatcaaggtaacggtggactcatagatattctgcatttatatttttgtaatcacaatttgtaaagaattctcaaaatccaacagtaagaaaacaaataatccaataaacaaaaaggcaaggactctttttttttttttttttggagacggagtcttgcactctcacctaggctggagtgcagtggcaccatctcgcctcactgcaagctccgcctcctgggttcacgccattctcctgcctcagccctccaagtagctgggactacaggcacccgccaccacgcccggctaattttttgtatttttagtagagacgggttttcaccatgttagccaggatggtctcgatctcctgaccttgtgatctgcccacctcagcttcccaaagtgctgggattacaggcatgagccaccatgcctggccggcaaggactcttaaaaatgctttatcaaaaaggatttatgggtggcaaatggcatatgaaaagatgttcagcatcattagcatcacaagacatgctaatgtcaaaaccatgacaagagataactacacacctattaaaatgactaaaataaaaatgctgacaataccaagtgttggtgaagctaagtagcacccaaaaatctcatatattgctgacaggaatgtgcagtgcaacagccactctgggaaatgatttgacagttttaaataaagttaaacatacacttaccatataacccagccaccccagaccctagacatctctagagtattcaccctagagcagaggtccccaaaacctaggtcatgaaccagtatcagtccatggcctgttaggaaccagccgcacagaggaggtgagaggctggtgagtgagcaaagctttatctatatttatagccttgccccactgcttgccacctgaactccacctcctgtcagatcagatcagcagcagcattagattctcatagaagtgcaaaccctattgtgaactgtgcatgtaggggatctagactgtgtgcttctcatgagaatctaatgcctgatgatctgtcgctgtctcccaacaccccaagatgggaccatccagttgcaggaaaacaagctcagggctcccactgattctacattacggtgaattgtataattatttcattatatattacaatgtaataacaatagaaataaaatgcacaataaatgtaaatgtgcttgaatcatcccgaaaccatccgccctactccctaagtctgtggaaaaattgtcttccacgaaacctgtccctgatgccaaaaagattggggactgctgccctagagaaaggaaaattttgttcacagaaaaacctgtacatgaatgtttatagcagctctatttctaattgccccaaactggcaacaacccaaatatcctctaatggttgaacagatagacagattgttgcacattcatatcatggactattacttggcaatgaaaaaacaatgaactttccataagcacaacatatgaaaattgttcctccagatgaatctcagaggaattatgctaagaggccagtctccaaaggttaaatgctgtatgcttccatttacatgatgttctggaaaagacaaaaccacaatgatgaagaagagatcagtggctgtcagggattgggtttgaggggtagtgtgactatcaaggcattgcatgagggaggttctgggatgatggaattgttttgtgtcctgattgtagtggtggttacatgaatctatacgtgtgctgaaatctgtataattatatacaacatagttaattttactgtatgataattttaaaaattaaatgaattagaaaatggttaacagttaatactcactcatatggccaaatgtataacaactcttatgaggcagcagtctggcagaacttattttctggtcacaaccctgctgaccaaaacaggatgtggtctacacaaagtgaagaaaccgcaggaaccagcagatggtgaggaaagtgatccctagctgccctcattgctcattagcatatgacactcccacaagcaccatgacagtttacaaatgtcatggtaattacctggaagttaccacccctttcctaggaagttctaaataacctgtccctcagtttgcattggcttgccccttaatttgcatgtaattaaaaatgggtttatgtgagtatacagttgccaggagcccatatgttgctgactgaagtgcactgcctaggagttatccttgctctacaaagagcagtactgttcaacaaaagattgccaattccactggcttgtccttaaaagctaaggacccttctgggataagcaccaattttggggctcacctattctgtatcagttatactgacatacccattttgcagatgaagaaaaggaggcccagaggggctgttgggttgcccagggtctcagagctaataaatggcagagctgagaacctgatttgggcagtttgccctcatggtcattattcaaaatctcttcattaactgactcaactggggggcacaaggccaaatttttctgagttttcaggtagctggtgattgtttttgtttaagtctcctaggattttttttttttttttacaaattacatgtttttgtaatttgttacatgctgtaataagaactttaaaaaaagtagatttacaacagctgaatttcctaaaatacagggtgcttgatcataagactcttcaagaaaaagatattttagaacactaataaatacaatgcgaaaaaactgtattcttatctgggtccttctatcagtgaagccaaaagagctattacaagacaacttaaaactcattccaaagatgaaggcagttgtctgtacaatgcagtgcatcccaggcatctccaaaagacagtaatgagaatccaacccgacagtgaagggagccatgcccatcagggaagttggtgcaattggaaggaaggaaggaaagaagaggtgatccaatcagcatattttttctttgagaacatgaataacaatattcatcaatttctcatacccacaaaaatgttctaaaaaaaacagagaaagcaagttagaaaatccgcaaccatagcaagcagtatcctaaagaaacataattatgtgctcacatacctgaaaaatgaacaggttatattatatagattttaccaactcatcaaagattggccacatacgatgaagactttgaataccatcctgaagtaggaataactaaaatttgcatagatgttatgatcagatcattatgaataagatgctagtattcatcattccaggaaaccctaagctggaaacattcaacattcaagcctaagttggatattattcaacactttatgcacaagtaaatgttaagggaggcaatatgcagagtgattaagagtacaagctccgaaataaacatactaaggtcaaatttatcgccaggcacggtggctcacacctgtaatcccggcactctgggaggccgaggtgggcggatcacctgaggtcgggagtttgagactagcttgggcaacatggcaaaaccccatctctactaaaaaatacaaaaatcagctgggtgtggtggcacatgcctgtaatcccaactactcaggaggctgaggctggagaactgcctgaacctgggagatggaggttgcagtgagctgagatcatgacactgcactccagcctgggtgacagaataagactccgtctcaaaaaaaaaaaaaaaaaaaaaagaaaaaactaaggtaaatttatcataaaattgtggacttgcacatgctggctaggtggaataggcatgttgcttaacctctctcaccctcatatctaaaatagaattaaaaatggtacctgtcttatagggcttgcctgaggattaaatgggatgattcatgagaaatatgtagttaataatgtggtacagaaaaatactcaataaatagtattcatgggctgggcgcggttgctcatgcctgtaatttcagcactttggggggctgaggcgggtggactacctgaggtcaggactttgagaccaggctggccaacatggtgaaaccccctctctattaaaaatacaaaaattagctgggcgtggtggtgcgtgcttgtaatcttagctacttgggaggctgaggcagaagaatctcttgagtccaggaggcagaggttgcagtgagccaagatcgcaccactgccctccagcctgtgcaacagagtgagactctgtctcaaacaacaacaacaacaacaacaaaacaacaacaacaacaactggtattaatgcaaacaaaaccacactgtgaatccactgctcacttacctgacaggcaaatgctcacagcgcaccctgctggcgaatctgtgggaaaacaggctctcaagtccactgcgggtgcaagagtaaatagcacttacacatctgggaatttactctttacacatttgcatatacaagctttgccactgtagtactgtttgtaacagcaaaacccaggagacacccacatgtccttcacaacaaatgacctccaaaatctactgttaaatggaaaaagatgtagatagtggtgggcaggctgacacacttgtgaataagaatcgctgcagatctattggatctaagatgccaggagtgacaaagccaccattaatttatatgccactaagaaagaccattgctgattaaattggcacaatgcttagaattttatatttgagaactcatttagacttatttagacatgaatttatatcatatcaactttgggcacaaataaaaaggaaacatatagacaaaataaatatgttaaggtattaggtgacaccaggactgccttcttgtatgatgcattctgatttcagagttgctaaaatatgggaaacaatggatgcctcagaatagacagagagtatcggcttgtatttaggaactctgcaaggacaactaagaaacttatagtggggagggagggagggaggggaaattgggcaaatggcatggataagaagggaggtatctaagacattttttggcaccatgtaaatatattacctatttaaaagtaattttttttaaaaaggccattcccaggtcatagtcaagattttgaacttcatttagaagtacagcttcttccctctctcaggggcagggtcgcaggggacatggggaagggcctgctggtttcctgtggccggtgcagatgctctgggcttccctctagggtgcacttgttggttcttcagatcttggttcacttcccttgaggaagccaatagattctctagctggctgcttgtaactcctccctcagtcctgcaacccaaggtctatcttgcactaaggtccctctgtccttccagagcaagacccaggacagtccagtctggctgcctcatgggtccacatttggctgatgggacttatagcacaagctccttcacaccaagttctctttgcttcatcagcctcttgctttcaagattgctcaggtgtgaggtgggtgcctggcaccttcgtcatctccaagctcttgagtggtctccttgagacaccaatccctaggctgagggagaaggaaagctcccccttcccctgtgcactcaaagccctccagtaacttcctttaaagaaaactcttctcagagctccaacttgaacctttaacgtctttggtgtgggaaagaggcaaggagacacacagctagtttttgaccatgtctttgaaagccctgtgtgtggacagcaattcatcctgggaggtggagtagctaggccccctattgccttgggaacccagccaaattgggatggaaataattccatcttagtatattgtcacatggatgatcaaactaaggaacctgccgaggccacacagctagtacccagcaggctgactcctaagcctgagcttttcctgctgcaggtggttcacccagagctgacttaaaataagctcatggtacagaggccaggccaggaggatggagttagatggcccttggttcaaactcagttgtcatttattagtagtgtgtccttgactgctttctcctctctgattctccgatcatttaaccaatagacgtttaatggccaggttgtctaccacgtgcaaggcactcaatttcattctctgtaaagatgtgaataataaaagcacctgtttcacaggagtgttgagaattaatgagatcatgctcaagtgtttgacagcgcccggcacatggtaagggctacacagcagcacctattgtcattcataaagttcctcctatgcgtcaagggcttcacagacatctttaatccccatagtctaagaggtaggaactaccattatccctgttttctgaatgaggaagccaaggctcagagaagcttaggtgacttgtctaaggtcatgcctggtataagatggaaccttaagttcaaagcctgccccaagcctccacatgccctctgagtttgtctcttgaggaaggacaacttttttgccttttcgtcagagaaccaacctttaatcacccttcacaacccagttcaagggtgtccgcttccgttttccctgtccctccctgcccgacccaatcgtccctcctgccactgcctttgtgcctgcctttttcacagcagtagagcctcggggtcaagggctgtggctctgcgttcaggtagttggggattcaaatgcctcttactccgtgtgtggcttcaggcaagtcccatcaccgctctaagcctcagtaacttcttccatagtgggctaaccatggtacccttgggttgttaaggcacaaacggcctggcacaaagtgagtgctcaaatgatggcagctgctattacgattagtagtagcaagtcctagtcctggcattgaggttctcagttgctcaacacggagggtaactggcccttaataaacctcttggtccagctgagacagggcaagaagggactggggacattcctgtcacacccgcttcctaccccagacacatcttcttagcacctgttgcaggaacaccctgtggctctaggtgccctttaggacgccccctcatggctgagaacctgctttgggaggagggactgcagttcccaagcaggcaccacatgggggtgctttaaaagccttcttgccttccatccttttagataaggtctggtctccatttcacaggttcatccaagcacgcacttgttgaggatctactatgcgtcagacaccatgccacctgctccggatacaagagtgaggaacaggcatttctgccctcatggagtttataagctagtggggggaccaaggaaacaagcacgttaataaatagagtacatattagatggagcagagagaagaaaaatgaagcaggtcaaagggatggagggtggtgggaaggggccagggcctatggggctctgcaggtcttagaagtttccaggggtaatggaaagctcccaaggacgttaaaggatgggagtggcaggctgtggttaatggtgccaaagaagccctttgcctgggtggggcaagggcagaagctgggggactgatgagattctgcagtcataggtgagtgactacggaggctggcccagatgatcgtaggggaggggtgaccaggggcacccagaggattgctgatggactggacatggcatgagatgaggccaccgaaacagagaggcacagtcacagtgcaggagctcagactgggacctgggtcagatgctacaagtcaaaaagtgttttctactctgcttccctgtcctggcctgggaagagtgtggcctggaagagggggactgggatccccagccacacaccctcaacacaggagcccaacgcccatttaaagaaggaaggccttttatttgggcctgggaatcaggagttggcagttctctctgaaatgctgggagttaggagacagggagcagcagggaacccttatttctgtaccagctgcttcccctgaatgagctctaagtcatctttaagctcctggcagggaagggcatgctttgtcctatggatgggtatgaaaagggccgctgcccctctggaagacactttggaacgccattaaagccatgcctagctcttgaccacatgcctgcttcttccctggccttctactgaggaagcagccggatctgtgcaagactctacctacagggttgctgggcatgattgttaacaagatcaaacaacccacatcccacagcaaagactagttaaaactgcacttttagaaagggcatcatgacaattactttgcctatttttcattttgatgagttttgggtatctatcaaggcatatccaatgaactgacatgcatccttgtcctggcccatttaatgccaggaggttctcttaccaaccagtttttggggagatccaaaatgccccagttgagaactgaattcagaagccccggaaccagtggctgagtatcctttttcttctaaacctgtgaaaacctatctgggtggatgggcctttccatctggactgcccaaaacagaaaactagggctgggaacatccttccccagcctggaaccagaccagtgtgatccctggtccaaggtcagagggactgtctctcaactgtggtggctgcatcaacaatataggtaagagttagatcacctgcctcgcttacttcccagaggtgctgggggccctgtgcaaactaccgtagatgatacaggttttaagtgggtgtttttacaatctcttctgcaatatactaattaattaagcagacactgtgagaaggaggtagggggaggtcaagtgtatgtatatgggcctggcagttagggatggagtgtatactgcactccatggtggctgaacgtgggctctggatgggaagaggcagtaccttaccacttactagcagtgtgactggggctcaaggttttgcactgtaaagtgggacctttgtgaagcacttaagtacttctgctggctgctgtagtttccgtcaaagcaacccattagaaagtacaaaactccattgtcctcattctggtttttaatggtcaaggtgacaacagtgtacagtttttccagacccatatgtaggttccataatctccacctgctggagaaaacaccgtgacagatgccattgccccagcaggccactgccggtgtgggaactttgggatcaaaagcaccaagccaagtcccttgctcaggatgggtcttggttgaaaccacaagcccttctgcagttctaggtggatgtagtgttggttcttggctcattgcaggggtgaagcaggaaagagaaagagactggtgaggcctgcttggaaagaggattgaggcacattacgattccaaaccaggagatcctgagtcagcactgattctgtctctggtttgtttaatacgggaaagggttccatccaagagcccaataggcctcctctcccaaacctgcatagcaatcaaacttataggggtggtggagggtctttaccaggctaggactactgcctatgtttctgcaagtcacaagtcagcaggtcaaagaacaagtgtgaagcagaacctgctaagcaaagccaagtagtgacactcacttccaaaacatacccagcagaagcctcctgcaagtaccaacagtgacaggtgcttgtagcacagaaaactcaccccttcttcaacagttgatttgatttgccacacatcactagtgaacagctcggtggcattttgactgtttatcttatagggcaagataccctgattctgaactcacttaggatgggttggcatgagctgtatcctagtgaaaaaaaatatcccacctacctcctaggtccactcaagacttctgcacgtggagtaaatcaagccataatggagcccctgagaatccccaggaggcgagcagtctggatggtaatggaggaaagggccaggcaggcaggtggaacagaatctcaactggccaagacctggcaagattagataccccaggggttgagtaaaaggagcacagggaaatatttattttcaccttctgaagacactgtgtgcatggagctctgacttcccacttcagggaactctggctgccgcccagttttatctgggcaagtgacatattctcgtgggaacaagtggtggcgaagcctctttctacacatttcccctccttcctccagtcatctgtggggctggcgggtgggacacactagtgaataagcattgtgtgccacaagtttttatgcagagaagatggaaggaagtttcctcccacaggccccaagataaatataattttaaagcaattaaagcctgcttcagtgggagagtttccgtacaacatgctggtgatattccttcaatttttttggttgtttttattttttttttcattaaagtccattgatcatcacaaaaacccaggaaatgcaactaaggagaaaacaaacgtccaaccaagatctaagaacccagagctatggaggagacgttgcactggactgctgggtgtgcacaagggggcaggaggggcgatccccatggggcatggccactggccatgggaaacacaggagggaggccaggcagctggctgggcggttatgttaaccgctgcacgatgacagcattgagcaggttggcttccttcagggtctggctctcatcagccagctctttgttcgggaaagtagtcatgaggataaagctggtggcagccatggctggccgggcatccacgatgaagagtcggatgtcgctgatcctgcaggagttggggaagcggtgagcagtgccatcctctgctgtccatacccctgccctgtggaaagctaaacacctcgcaaatcccctttcctgactttctccacagaacagcgaaagctacgctcaggcatgtgggaccaagtcccttccttgccaagagtccttcactgttgtttccattttccttgagataaacaccaacaaccctactgtgttcccaaggacctaattttataccaccctctttcccctcgttctcttctgcccgcttctagttcatcaggccatactctcttcccacatttgggtccttctttccagaggctcccctgcctgatcccctttctgtaatcctaatcacaactcaggcctcggatccaatgccacctcctcaggaaagccctccttagctccttggctccatccctggccctccttccacgtttctgggatgatctgattagtgtctcctcctgcagctcatgaatttcacaaggacagtgtgtgtctcttttgtatatcacaggaggcacttaaactatctgtcagaaattaatggtcaacttctcagggccaggaatcgtttctccagacactacctgccttctgaacctggagatcatatgacaatgaaaccacctggaaacaatgcctccttccctagagcacttaaacataagtttcctttttgccccaaacccctaaaatctatgcaacttacaatttggcacatctaagggcatggacctgcaggattctgcctgtgacttttagcaaaccaagctttttcacctagcaaagcctctgcatgggctgtccaccctgggaatgggcagcagtgtgctgagcttaatgagtgaaatgaaactgagacaaataactcacatcactgggatgggtcactcgcttaaccaccaggcacttgagtgtaatgaatgttcctgatgaaggaggtctcaataggctctagatgcacctggctcacagctggggcttgtctcccgctgtcacccacaggcgagcccagtcaatattcaacgactgacaaacaattcactgatcccacatgtgggtgctggcttagttggctcatgaccaataacatttagacacttctgttctacagaaaggaggcaccaaatatatttactggcaacagtcctctagcacctctcctactagtctcttcactttgctgtggctcagtttccccatctttaaaatgaagaaggcactgatccagcccagatggtctgagatgtggagcaggcattcccagaattctcgacagccagatctagaagagatcttcctggcccagtaattttcacaggccccttgtggggagggaggtggaggaagccaggtgagtgggacgctgacactgcacccccttctcctccatcaaccacagcagttctaatttgatgtcttcacaggactttagcatgggacttcctctgaagtctggtagcttaaaaaaagccctgagaaatctaatactctaattttacagatgaagaatgagacacacagggggaagtgaacagtcactggccacactaatggaagagtggggaccagaacttaaggcttcagacttgtagtccttaccaccctcgtgtctgctttggggaaagcatggagtgcctgctggtatttaggaggaagaacggctctctgcttcccacacatttgcgtgaggcccagaggacactcctagaataagctaggccacacaatgcaaggtacctgtggctgtggttaaatttctgcaccagcctcccgccgtctgcaagccgaatttggatgtttgtggtaggctctgattcgtcgattaagatggaagagctggctttggcttcattttctgcctgttgggctggagagctggtactcaacacctggggggcagtgctgaggagagaggatggcatcagaacacaagcagaaacaaggcccctagcaagaagggaatcccttcttggactgttactgagcatttgcaatgcgcctggcattgtttggtgctgctgatctattgacccagacagggaaaatcgtgcccttatggaacttacaggtccagcagaattcacttcaaaccctgagtcatatatttcatacgttattgctagctccctcgctcctgagtaatgtgggcaagttactcggcctttttcctccttggtgtcttcaactgaacaagggcttgaagggaggaaagcaggacagcctagggtgggagagacagggtcataaggctggaagacataatagaacagggtcagttttagcctcaatggagtggtggaggggagtgttccaagtctgcagctgaggcagccttggcacagcctggcaggtgagtggcaggatgcaggcaaagcaatccagattcttcttctgtgatggaattttcaggcctgcattacctagtgcacctcactcccatgtgtatctgtactcatacatccactattgagggcaggggagagagttctaaagggcactgaaaagccaattaagtgctgggttctgctgggattcatcatacaatgaacaggacacggtgtcagacacagtgttagatttcatatctcagaatcacatggaccagggtttgaattactcaagcacccttagtttcaacaaaggtagtaattagatttttaaagggttaaggcataggccttgctcagtttttgttaggattaaaggggaaaattgcataatgcactcaggatggctgacaaacacaaaatgcacataggactcccaattctccacaactgtatggagccgccttctctcctccaaaccacctgtccacttcactcccagtctttctcttagcagatgacctgacttagacctttgcaaagaagaaaggccactagatgagcatttgcttcccctcaaagcctctaattagatcagttcttgtaacttactcttcccccttcacagccccaaaaatggtactgagagcaaatccaactgaaagtgctttccaaagtgtgttccataggaaggaaggtgtaggaaaggccacatattacactagcagcttcagaggccattggcacattaaaggttttgagagattgcacagttaaatattgccctgaagcatataattaaagaatgactgaaaagcaaacttactcttttctgtgaatgtgaaaaacatggacttacagaattacaaagtagagctcagaggagaatgtcacccacattactagcactagagaagctgcttctctgcatcagcctcaaagcatgtgggactcaaaaagtgtgggctgggacacacagtttaaatgacactacgataggccacaagagttgattggaaatagtgaataggtaaatctcatatacctgtaaatgcctaagctctgcaccaagcttgtccaaccacccatggctcatgggccgtatgcgacccaggacagttttgaatgcagcccaacacaaatttgtaaactttcttaaaatgttatgagtttttttttttttttgctttttgttgttgttagctcatcagctatcattagtatcagtgtattttatgtgtggcccaaagcaattcttccaaagtggcccagggaagccaaaagactggacattcctgatctacactatctcgttttgttcattagtttcacagacattaggttaactctccaattagactttaggcagcctgtccctcaactatttataataattcaaagtatacgtactcattgaaaccaccgcctgccagaaagggaactataacgttttcaggcaggcctaagatgagaaagaagctgttaagccaaaatagctgatatcagttaagggggtggggagcagaaaaaacaggagtgacatttacaccgactctgtgcaggtattgtctaaaggggctttcacagccacgacctcgctgaatcaccacaaccatcctctgagaggggtgtatctccattttatagatgagaaaacacacacacacgctatggatcatttttaaaaactaatgcaatgaacaagcctcctttcagtatatattctgtgtattcccaccagccaggattttgtcaagctttacaattacgatggttttagaaaaataatatttatattggaaatgctttctcaaacttctccttgagtttcactcctcacttatgagctgatgaccctcagcaagttactgagcatcttggcacctcaatttccttttctataaagtggagatactctccttaccacagctccacgccttttggggaagcagtccctactgtccctattatcaaggagagttggtgtgatgccagagaaatggcacaagctttggagctgagccaccaccatttggcctctgctctgcctctaaacagacagtgtggccttaagcaagtcacaacttcccagggcttcagtgtctttgtgtgtaaaatgaggagctgttctgttgtgaggatgagacgagataatgtgcacgcaaggcctggtatttaggaaatcctccacacaaggaagcagctgctgtttgggtttgcttcccagcacgtcccattgcagactgctggtgggtcatcactggaagagatgaggaaagcctgatgcctggacttggctgtgtagcttctgactggctgtttctcttacacactccctaaaaattaggtgaggcagggtggcctgataaacatggtgactatttatgaggcacccattcctaagccaggccctgtgctgagtacttcacatgtattaacttacttaacccacaggcttaacccccagcctatgaggtagggattcattacagatgaagaaactgaggcacagcagggtgaagcaacttgcccaaaatcccagtgttggttcacggtagaggcagtatacaatccgagctatttggctctccatcctgtgctcttcacactgtcccactctcctgttgggccttacactcagacaggtataggcctggatttcaagacccagtttcctcatcaataaaacagagttaaaacttcccagatacttgagaaaatagctaaaaacatgcactgtacccaacacatactaaaagtacaaacaaatgtctatgtggctatgcaagaatatccaggatgctatgcaggttggcaggtaaaggcagagactggagggacccagctctgcactggccagcaatatggatctcaccaagtctcaggatccttctttgtagaatggggattaaaacaggattaaagaagataaaataaatgaaatacttagcatagcgcttagctaacaacataaaacactcgactaactaattatatcattcttcaaggtcctgccccacttatatttgcctcaattctggaccaaaatcgactagaaatgctatcagctgccatgggctgtaagtggaaggtcacctgacaggcattcccagtctatactgctctcaaggaggatggggagtggaagaggaggggaaacctgaagaccaggcctcctgatttttcaaataataagagcacatcattcaaagaatattagttccatagtgctctaatcatcccgcagggcagccacacgcatctgttcaaaggagctggcctgccagctcttcctgagaactgccaacagctgggctactgctcccagtgagcggctggccatctgcagctgtgagggtgcttgattcacaggcaggaaaggttagagcagacgtctataaatagtgttttttggtgtctccctgcaaacatcgtaagttatggggaaaatgagtctcaattcaagagcccgaatcacccaactcctcctatctttacagggggaataaactggcactaggtactttcttgccacagttacaaatcctgagaccagccatcttctccacaaaaataaccactacagaaggcacgggagcagctaaagctcacttccagcagcagtgacccctcctcccaagtgcactcttgctgtttgcaattcgaaccttcagatcagctcccaactcaaacaaactaacgtaaaacctaaaacaacaacaaaattctccggtttctcttcagattgtatacatcttttgccttttactaaaacaacaaaaaaaatttaatacaactgaattttctcaaaatattttaactgagacaacttattcattcacttgaagtattttcccagataattaagattttgaaaaagcccagtactgactgatttttgaagcaaatctgagaaaattttcaggaaaaatttcaagaaaagttcaagacttttggcttctgatcattttggttcacaagacaatgaaaaacatagtaaaatttatgagaaaaactaaagcagctgtcctgatttagactgaaaagctaaagtcccatctcacttaactttataaaactgtggctgttttttttttaagctaagttttcataaaaagccagaactgaaataaaatgcaagtggaactggcagtgaacactttgttgataaacatcatggtgatatcaagttctatcttgtgctcattctccacattaatatttattcctatcatgctaaaatagactttaaagatattttaattttctgagatgcagagtttcacacacataatatggttagactttccaatagaaacatttcctgttagtattataaaatcatacccaaagtgcatggtgttctgaagttctgagccctcccttgtaactggtggtgggcataaaaaatatagcctttttgaagggcaatttgacatcttaaaagtatgaagcccttttgaaacaataatcatatgtctagcccaagtgtacaaagatttaatcacagagatattcactgcaatgttgtaattctggtagctgcctaaatgtttaacagcaaggactggttaaattatggcacatttatgggctagaaaattatgtaagcattataattaaaagtgtagaaataagcttactgataaaggatgatagccatacttcactgataaagtaaaaagcaggtgatacaacagcatgtttacaaatacatgcaaatgagtaagagaagaaagatacacttgccagatatttctgggtgttagcttcaggacagcttttattctttacctgcactttctattaagatgaacatgtattattttaataatcaaagaaaaaaaaaattaggtgccctataaagctcatcacaactgacagggacactctctgtgagaatagctgtcctgggctagtccacagcccttgatgcagtagatgaaatgatgagaacagggatgacttaactactttgggccaggtaaatctaataccctgaactctgacccttgctcctgatgaggcatgaatggtcaacaggcaggtaagggattccaggagagggccagccagaagctcagagggcatggttgttggaagaccaagctttgatctctgaagatagtgaggtgagcaagggcagtagctactttgagaactgccagatctaggttagaaaggatgtctcattgtgcaggagtgcaggaaggaatgccagtcagaaggcctggggtcttggctctaacacacaccagccatgtgcccaaggaaaggcccctaatatccaagagcctcagctttctctctacaaaataaggatcatattggcaaggagggtcactatgctctaaatgcctatcatgtgcacagttccctctgaagaacactcatcaggtgaccccatggccatggccaaagctaagtggatcctgagagaaggcagcctacctatgggctggccaagagtctggtgggagaaccgtatgagggataccagtgactattaaccaatcagatatcatcagaggctttgaatggaagatagagaatgtctgttagtagagggtacaggagtgagaaggcagtagcagaggacacaatgcagaaaaagtcacaagtggcagagtgagtgtcaggaagggccaaataagtagaaataagagctgctgagctgtcataatggtggcacaccagcctgcaaaggggcagcaaggttcctgagtgtccctgcatcctgagcaacacactgtgaggcctggctaggcaagagtctgtaatttcttattccccttggaatcctcatttcagccttaagccatcaaggagatgacaccttccctgaacaccctagattactgagccacagcagcaattacgtacactttctgcttacattgactgctcactatggaacagtgttctacatgcatcagctcacttattccttgcaacaataatcctaggaggtatggactcttattagtaccaatttatagttgaggaaactgaggctatatagtccaaggtcacactgctagaaagtgaagcagagatataaactcaggtctgttaactccagtccatgttctccacactcttcctcccatacaaataaaatttgaagtattttgtaaacagtaaagagctaataaccaaagtgagtgatacacagggtctgctgggcttggcaggtgtgattgacagagtctggctctaacctgtgctgccccttacctgcccagtttctgaccctcgccagtgaaggctttgaaggctcctttgggcttcacaaagtcctcgtcccgatggtcctccatatccaagttcacctgtccaccgtgagctagcctccgaagctctgctggcacctccctgtggaagaaaaggccatgctgaggtccacagagagaagatggaaatgacagtgatgggaaaaggggagaagaaacctctcagtcccgtggtgaaaaatcgctgggcctccaaagggagcaggctactctggtggctacctgtctgcctccaccttttctcttgtttgttcagccatggccgacacctatttcttatttggccacttaggtctgcctcaggcccaaaggggaaaaatggacatacaaggtttttggagcagatctatgaatccgtatctcaactatgctgaatctgcttcaaacaatttactcctcaaataataaacattctgcctcctcctttcccaactgctatccactcactgatttgggacctacaggagggctttttcactcaccctctgcggatagactccagaaactgggcattggatgggtcttggtagcttctgagttctccattatccaggctgaatccactcttccagagtttcaatactacatgaacctgtgatgacagggagtaaacagttaccagggatctggcaagcataccaatttgaacttgcaaattagcaggtttttactatttctcagtgttgctactattaaaacacacatagagacacacatatatacatgtgtgcacaagcaactcaacaagcaaactaaataagcattaacctagaataggaaggtggcctagcacagactaagagcaggggttttgttttaggacacctgaggttgcatcttgactgtgccactcactagctatatggctctgggcaggtgactcaatcgacgctttgcttgtgcttggtatgccgtgagtgtccgactaaactaccatggcaaatcttgctcatggactattccacagtcattaaaaatgttatctacaagttctgttcacaacaactcccacacacattcacagcaaagggtctagaaggctaaaaaccaatgcattagcagctgcctcggaggataaaatttttattttcttcttgcttgactttattttggaataaaacccaaaatgatttaaaacatattatagaaattaatgatcacaagactacaagaagatgtttgtggtataatattgaataaaaaagactcaaaattgtgtgtatgattacacttgtggggaaggagaccctatgcacagggctaaaaagtagtggacaatgaggaaaactaaaaaaaaagaaaagaaaaattggtgttaagtcttctctggtggtctgaagaccaagttcttcagctatactcgcatcactagagaaccccagatacactgtacctctgcctgagatccatgggctgctcaaaaaactccttcatttgcccatcccctttccccacctgttctcaccagctctctcacccagcacccaggaaacctcctttgattttccagtaagcgtctttgttcgtgaaccacagcaagggcactgtctctgttagtttccctttcagaggctgctggttaatgcacaatatgtaaccaatcccttcagaaaaatggcagaacagtccacaagcttccctcatgggaaggtggatgcactcacatcttggctggaatgctgcctcttttctcctgccacataggcagactcttcctctggtgctgccccaaggcggtagccacctcctgcaaatggctataagggacaagttcatacacatttaaggggttggtccatggtacaagggttactcagatacaatgatatatatatcttaggtaagaggaagaaagaggacagggttcctgatcaagcttgttagctactagatgcactttctctgatatcagactcagtgcctacatgcccaggcagtatggtaaatgaattaggtggccagaattggggttaagagctggaaggggcagtgcctggctaaaggaaacagatgctactaaactctcattaaccgtgaccatgtaggaatttgggtacaagacaatatcaaagactttttgattttctcaaaggagacagaaatcccgattttatataaaacagatgactattaattcaagtaaaacaaaataaaacactaagtcagtcaaatttgataggccaaacaaaacatgtatgcagaacccaatctagaccataggctgtaggtctgaaaactctgccccaaatcttggtttcacgttaaagggtgagataaactacactcgtgttccgcacagaagaccaagtaagcaaatgaaaaaaagaaaaaaatcagtcactaccggggtgaagaaggtggcattcccagttctggaatctcagtcctgtgggcacagacaatgacccttatactcactctcggtttactggtctctccagggctcttggtcactcgctccacagctacagctccatgctctttggcacctttaaagagatcatccaccagctcgttgggacttttcttcctgggagggccaacaatctgctgtccacttctctctgagcccccagcataaaacctgtgtacaaaatacacctctaacatgaaacactcatggaaaacatgaatagagcatgtgccaggttggtgctgggcacactgaggcaaagggtacaatgcttgtctttaaagaatttactggctagttgggaacacatggaaggaggcaagcaggtaaaatgcagtgtgagcagcaacagaagtcagtgagggaacactgggtgggaaggacagccaaggcttcctttaagggtgtcttctgggctgaatcttgaggataaggatgagtttatcaggtgaacaaactggggaaaggcattccaagcatgcaaaacagcttatcagttcaggagagagtctcagctgggactatcaatctggtggccaggctcctctccaggagacagtgactacagtcatagtcagaagtagctaccactagtgacttggggttaatggtggcactggcatggttagtacaagcagctaggctccagtcttggctctgccactgtatgtcctgggtaagccagtgcactactctgtgactcactttccttgtctttgaaacgggagggaaggaccacatgccctacctacctgctccttaagtcagagccgtgaggttcaaatcagcagatgtatgcaaaagaacaagcacagagtaatgcacacaggtaaggtggtgtgacacagcaccaggagctcccccaagcctcacctcaccttgccattcatgtgacacacactgtggcccctgaggaaagggtactggaggtcagagaagctccaatctcaaatacaagccccaagacacccacactgggctttgcaataggccaggcatggcttgagataataaagttagtacttttttatatgggcctgaaaaccagttgtcatgcagcctggcccactgcctccttattactcctattcagagctaagtcaacagcttgtccccaagcaagaaaaattgagaacctataaaaattagtctcagccctctatttcctgacattcaccagggaatgagaggcaaagccacaggccccgacaaggacaacagtaccagtgtcctttcaggtctgaaatgctgaggggtcaaggaagtaagcggaatgtgaaataaaggaaggtcactgcctggaggacgtgactgggtgggaggagaacgagaaagacatttaggagctgggcattcacgtacttgatgacactgcctttcactcaggagtgtgaaaccccaaaattaacatatatttttatatccagaagtatctaaaaggaaggttttgagtcggtgtgaaggtcacaataggaatgaaaatagagaatagaacacatgtaatttctcagcccacttccccaaagactgaccatgatgagataactgcattcccgaaatagttattatacaattttccttaggaatgtctgacagaccgaggcagatcctgtggagaaccaaaacccatgaaatgaggctggcgttcattcttgttcattccaggtagatgaagttctgctaaatggactataaagtctttattaagggatctcaaagccctggcttcagaactgggagcctgtgatcaagagccttaaaaatatgcatgcccttgacctggtatttccatttttaaaaactatcctaaaaaaaatctgaaatgtggttaattaatccacaaaaatgttcatagcactgatatttacagtagtaaaacattgaaaaaaatctaaatgtcaggcatcccatataatggattattattatagcatatgaaaaggcatatgaaggattttaaggacatggggaaacgtctgagatgtagcattgatccagcaaaaccatatttatatacagaacaaagactggatggaaatatgccagaatatcaaccgtagttaccaaagggtagatgagtttaagactttttcattatactagtctgtagtttccataatggatatttttattataatgttctaaaggttaaaaacaaatagttgatgggtacatgtctattgggggaaatatacacttataagcctattattctgttttttacatgatgttttttaaattaaaaagaaaaagctggaaagaaatataccaaaaaatggatacctggttacgtatggactgtaatataatgaataactttttctttcttttccttattttttaaaattgtaaattggcaatttataattgtatatacttatggtgtacaaagtgatgttatgctttaacaatatgaagtggattaaatcaagctagttagcatattcatcacctcaaatactcaaaatttttgtggtgagaacacttgaaattaacacttggcaattttgaaatgtacaatgctgttttattaactatattcatcatgctgtgcaagagatctaaaaaagaaaaagccccaaaccatattcctcctgtcttaagattttataccctttgaccaccatctccccattatgccctcacttctgcctctgtaaccacactctgtcgattgttctagattggaattgttctagattccacacgagagcatgctttatttgtgtttctgtgcctggcttattttagttagcataatgttctctatccatgttgttgaaaatgacaatttccttctttttaaagactgagtagtattcctactgtgtatatacaccacatttgctttatccattcatctgctggtaagacacttatgctgatccataacttcgctactgtgaagagcaccgcaatgagcacgggaacgtagacacctctttacaaactgatttcaaatctttttagtcaataccaaaaagtgggactgctagatcttttccttgtttccctcccctaatattcctcaataaatacattaagtaacggaacaggggtcacttctaagctacaaggagtagaagagacttcctaagatataacccacacagaccagcccacagtagtaatggctaacaataaccaaacatgtttaccaggtcctgttctaggtgatttacacattaccctggacttccctgtgaactgtccccctgaccccctctagaagactcacctctggccttcctcttcctcctcatcttcatcttggtcatgaatgaggtctctgaaggatgtcactctattatcactggagacacagaaaggagcaaaatgatctcagggagcattaagaaaggtaaccctcatcaccagctgctaaggaggtgaagacactgaggttacatttttggtaggcgagaggaggacgttatgtggagaaaggttaatcccctaagattacacataaaataatgtggcatttattttttcaagatcacacagattgagtataaattagaaagtcctatcatgaggtaaaatggaatcccaatttaagctgccctggctttaataaaaactagaaagtatttattaatatttaggaaaaaaagcagtgttgtgtggggtgggcacaactaaaaatgagtacagacttaagtagtacagacagcggggagtaacagggaaactaagaaaggcttcccagaaaaatgaaatatttggaccaactgccaaagaactagtggacaatcatggtgatggggctgctggggaaaaggggttggtgtagcattataggaaagcagcatacacagtgcacagagaccagagagttgaaggaaggacacatagccaagaagtaggaatgaatgaatacgagggtgacagcactggaggaaaagcaagctccagtgtacttctgctgcaggttagtcaagaagtatttatttttagaaaaaaagcagtgttgtatgggatgggcacaactaaaaatgagcgtgagaagggttaattctctctgaaattatcttccactgccactttccacctagtttagatctgtcctcaaggaacaagcttaagtttttcaaggatcataagacaagttttatcaagatttaaaaaaattctgtatttcttaggggaaaaaagcagcttccatataatatgggacaaagagggtgacatggtttggctctgtgtccccacccaaatctcatgttgaattgtaattcccagtgttggaggagggacctggatcatgcaggtggatttccctcatgctgttctcatgatagtgagtgagctctcacaagatatgatcgttttaaaatgtctggcacttcccccttcacacatgctttctcctgccaccatgtgaagatgtgcttgcttccccttcgccttctaccatgattgtaagtttcctaaggccttccagctatgcttcctgtacagctgtggaaatgtgagtcaattaaatctcttttcttcataaattacctagtctcaggtagttttttatagcagtgtgagaaaagactaacagagagtaatacaggtttagtgaggctttaatgagctgtttactaggaagaaagctccagttcagtcttgaagatttatttcaaggagacaatcaggggacagaagagttttgaggatccatcaactagaagtgagaagacaaaaaccaatcaatgtagcaaacaagctccctgcatgagttggctcctgagaacagtctgccgggcattccttgatgcttgatatgacatggttcaaaaggatccaagtgatgagatctgtactagtaccctgagagtactagttccactcattcatcttcccaaagggaattttccatacatgctcagcctaaagtttcttccaatgactaggctaggatgagcatctatgaaaaaaatattttctatctccctgttgttaaactttcaaatatatgtgtgtacacttgcttgggcaaatcacttgctctgctatggctttgtttctttcccccaaaactcatacacccagactctgatggtatccgacattgattctggtatccatgtaccagattccaatcccaattctgcctcctacccttgggatcttggacatgctatttaaattctcaaagccttcattttctcacatgtaaataagacaatcacagcaccaacctatgggctttctgtgtgcaggtggggtactgatgcacggaaagtcttttgcatggtgtggcacatttaagtactactcttgagtagcagttctcaaagtgtggtcatggaccaggagcatcagcattacagtgaacctgtcagaaatgcaaatccccaggccccctcttaattctcctgaatcagagcctctggaaggggtatccagcaatctagccttaaggagcccctgaggtaattccgacatatattcaagttcagaaccactgtctggagtaatgctttcagttaccttatggcatggatgtcctagggatattagcaattgcacaatacttttgtcctatggtctctacaaattggctaaatatctcagaaagttcaatttttcaatattagaactatctcccaggctactctggcatactgaagtggcacaaaactccttcatcagatgacattttctgcttttaatccggttaccctagctctgcctctctgtgatgatggaaatgctctatctgcactgtccaacagagaagccactagccacatttggctattaagcatctgaaatgtggttagagaaaacgagtaacaatgtttgtttaatttcaattaatttaaatagctagtagctaccttgttggatcgtgtaattttagagaatcagacaatcgtagttcccggaagtttaaagtacaacttttgctggatgaaagaggggaaaaaaggaagaaactgttacctcttgcttgaccctgcatacaggggtgggaggtgctggcagggaggtagcatgtggcagcagaagcagctttggacttaggcagacttcgccttgaatctgtggtaacagcagctgtaagttacttgacctttctaagaattagcatcctgaccagcgaaatggtaagcaccttacctatttcaaagctgttgaacagtatcagaagagaacacaggtgagaaacatggcagagctttggtgactgctcctgaaatactagccgtcccacttccaggaatttacaatttacttggggagaaaaattaagttaaatatcaggaaaagagttcagggcaatgtgggagagatgccacccagtagtacatggatatagtcaaagaactgaaggagtgatagttgtgactggagttctgtggaacagaattatggcgtgcagcctggtcacagggttagcaataacacgctcagcagagtggggatggaggtaaacatggaaggatgcatgggatttgtataggcagaaagcaagagagcgggcacacctgatcaggtgagaggctcaaacaaaagcaggagaaccaaaaataaggaagaattagagcaccaaagaaatcagtttggttggaacaaaggatttaagaaatgaggaaaagggaatcagattaggaaggtgggtccaagggtaaactctggaggactttgaatgtccacaagaagaggcagaacattgttggggctgagagctgaaatgctgaatgtagaaaacagccctacacttaaatccttgttttactagctctgtgatcttggaaagatacccaacttcagtgtcctcatctgtaaaataggaatagtactaacctcagtgctaacagtactaacaacagtactaacctcacagggttgctgtgaggactaaaaagatgttcatgtaaaagcttaactcagtgcctcactcgtaaatactcaataaatggcagctgttattactgagtttaaactgtctcctatagcaatggttaacatttttatgtctgtcagccctttgagaatctcataaaagccatggactctcttgccacaaaagatacctgctaacatgtacacaaacttttgcctgtaatttcaggtattaatagagaccttctcacgctcatttcatagattcctcctagggttctcgggctccatattaagaatccttattctagagttgggtgttgctctgaggcagcagtgacaacataaaagggtatgtgagaagtcaaaagtgggggatgggagagggcagcagctggctaagtgtcctgcaactgccaggtcaaagcagaggcaggccccacacagaattcctctgaggtgctagcacaagtttggtttttcctgagaatgtagtcctagcatttgctttcctcctcaacaaggacaaaccatgcaacacactgcgccctcctccctccctttttcttgtcttcagttcttttctaagcctactaccaagtctgagccttaaccagagcaataaagcaatgcctcttggaccaaatgtgcgtccagtctttttactcacttcagttctaatgttaaactctatgtccttgattcttttacttttatgccttttttttttttgagacagagtcttgctctgtcgcccaggctggagtgcagtggcgcaatctcgactcactgcaagctccgccccccgggttcacgccattctcctgcctcagcctcccgggtagctgggatgacaggctcctgccaccacacctggctaattttttttgtatttttagtagagacggggtttcaccatgttagccaggatggtctcaatctcctgacctcgtgatccaccagtctcggcctcccaaagtgctgggattacaggtgtgagccaccgcgcctggccacttttatgcctattcttaaatgtacatacttgttggggaatagagtaaacaaaacaggtcaattgagaatgaatgctaaaaatgataatactaaaattataataacaacacatgctgtgttctatttgctttgtaagtattaactcattcagtctcccatgtggtaggcactatcattaccatttgacaggcgaggaaaatgaggaactgaaacgttaagtaacctgcccaaggtcacaaagcttttacttaagtggcagagctgggatttgaaccaacgcagtcaggctcctgggcccatgctaataaaccactgccttaatagaactttgggattactggagaaaagaaaggagtaaacatgtaactggcattagagactaagtttaaatctctccccctctataattctgacatgccaacatcccaacaacaccctaaggtggctgtcaaagactcataccccagaaaatcagccatctctactagcagctgcaagaacagcacttaccctaacaacatgtcccaagcagtaatacccagatgtgccatcaccaacatctcataggttagcacgtgcaaacagttacaagatcactttcctcctacctcttttctctggatgggagttagggaaagaagaaagcaatgagatctggggttagtgctccttcttcgaagggaggaaatatattttaaacctcagttgcctttagagagaaacataatttaccacttcatggcaaagaaacactgttggttatattctggggttgaattcaaacccaaataaaatttcctggctaaaacatacactagagagtagaagcaataaggcgaaagcagagaggggagacacctctgcttacacactctctgtaaaggttcagacacctttacaggaagcacccctgcctgtctcctggaagaccagcattgtctcactctgcagagcacaggagtaatctgctgtgggtgctgtgggaggcagcgacaggggatgcaaatgggattgcaaaggttaacactgttttacctagtaagacaaggtctccctaatcaacttggcaaagggtgggttacacaggtttattttgtacaagacttcttaataaggtaacgggcatcctaaaatatcaaaacagctttcctaagtcatttcgcctaaactttcacatctatagcacccttgaaaggaagttttttggcttttacttaaaaactttagagttgcagtggtcattcctcatactacataagtaaaagtcttaaaagtaggtttgtggtttcccccaggattgaaccataaaccacacccagttaaaagtcatgcatctctgtataggaaatgactgaggcctgctgggaagtactacccattgactcagtctaaccttctcattcagacctggtccacacacccaggcctgaacgctctggtcagaaaatagctcctcttcactgctggaaacactcatgtagcgataattgaagctggcccttacctgggggctgtgcctctggacactgaactgggggttgcctgcgaaatggtcacaatgtcttcatcccctccgtcctcataaaagctcgctagcgcgatctgaaacagagaggtagtaccttgggacccttaaacaggccttcacctaacgcacatctcctttgagcacaaaggaatacagacatggccaacacttacaaggtagcttgcatccatgggccaaagaaaattagaccagaaggttaacagctcagctgttagtcttcgtgtcaactgaaacaaattccacccactaaggtgaaaagaaggcagtaagaatggctggggtggaagacactctttattctcattttatgaagaaacgtgatctagtaaaagtagcacacatttagtgagcatttacatgccaggttgttctgagcattctacatacgttaatttgtttaatcctcaagaactctatgctattagtactcttatcatctcattttatagttgatacagaagcactgaggattaaaaaaaaatttgttcaagtttacacaactggtaaagagaggagccaggttccatccctgctagtgtgcttaggccctcactcttaagcgcttccagtacagcccggagtcaggaactgtggagtcagtccaggttgctacttttcctttctttcaagttgtttcctaatctgtgaaatgggggtacctgtctcaccaacctgcacactggatgagataatccattaagatttatgcatactcgcatcttaggtttacacatacagaaggaatatgggaatcctttggtcatttgtgacatctctgtcaccaactcaacggacaggcattcactaatcacttgctttgcacaaacacaagaaagcattgaggtcacagagatgaaatagacatggcctctgtcctcagggtcaccaacttcacaggagacagtgagctgtcaagggataaaagtaatctgctgggaggcagtgtgctgtctcaggccatgtagtgaactggcattctcagggagcctacattcaagtcctgttcctgccaggcaagtcacatgcatgatcctcagtttccccactacaatgtgaggggaacgagacagaagatctgttggtcacaacactgtgtgcttttaggtctttcaggtagaaactttttatttctgcccagcataggggcttcccattgtgtctaggtgtgatctaggtgtgatgctttaccgaattcttatgtttggggagtaatttacgtttggcagcagactcagttcaaattccaaccccgctacttactggctatgtgaccctgagcaaattctttgccctctgtgcttccaattcctcatccataaaatgggtctagtctttacctcatagtgttgctaggatccaacgaatcatattatgtaaagtgcttggcacatggtggtttaaagcttgggctctgtctgcttgcaatcagacagaactgggttccacttctacctcttctgcctggtagctagtgaggccttgagcaagttacttaacctctttaatctcagctgcaaaatgcgaaggttaaatgacaaaagacatgtaaagcagtcagaacagcgcttggctcatggtaggtactcaataaatattagtcatcaccgtcatcatctacctaagacgaagctggccaagaatatttatgcaattctttctacagttaattaccgaatgcttattatgtgccaggcattgttccaggcactgggaattcatcagtgtacaaaaatccctgcctcgtgaagcttaagtcttcttagcaagtatttagtgaatactcagtacgtgccaatgaactacacagcaatttccacgagactcccattttacagataagttaactacgcaaggtgaagaagctccaaccttgcgccaccaccccagaggtattctcccagcaattaggaaggctgggcggcggtcaactcccgggctggacttcggaagtggaaatgagcggccacctagtcccgagtggggcttcacccaagagctgctcactcggaccagcccggcctccagcagatactcggcgcggcagccacgcccccaggcgctccctctcctcgccggctgccgcagcgcccgaagtctcgctgacgccgcaagcgggcgaggcagggtgaaactggcacggcagaactggctggggctggcccgcgttcccccactcccaagccgagcaggcgacgcgtgacaagcggtcccgggaccatgaggcctgggtcgggccgcggtagagcggggatgactgtgcgcttcggccgccgcgggcttaaggcaccaggcgcccgctcccagcagtccccggcccacccgacacagcccgccgcgcggcgctacctgcaagtcccagccggccgactcgagaaagaagcgggcccggtcctcctcggcgcccgtcaccgccacgaactccctcagcgcctcctgtcgctccgccgccatcttcgccccgtgcgccttccaaagcgctccggcggccgccgcacaggcccagccccgctgccgcgttccgcttgccggtcgacgaggcccagccgatgagggcccagcagctgggagcccgcccgcagccccgccccacgcggtgcctcacgcaaagccctccgtgcgggaagccccgccgctccgcgccctctggcgaccgcggcgcgaaccgcagcctaacggcgggggtgggagcccgaaggatgagaggcggggcgggtcttacatacacctgtgggctgaaggctccctgcaggagtcagattcccagttattcattgacgcagccctcatttcattaattgtgcattcgttcattcacttacttgtcaagcatttactgagagctatcaatggcccgacgtttttctagggctgtggatatggcagggagcaaaacaaagtccctgctcccatgcttcttacattctaggggtaaaaattcagaccttgaacaggctaggcctccgctcacaacacgtccatgcctcgttatctcgccccgcataaaagacagtctcatggcctgcctgcaggacccatgagagatgggccagttcctccctctcatcaagggatccgctagcttcctctgctccaggcgccttgccctccttgctgttcctggaacttgccagttatcttgcatttgcctcagggccgttgcattagctgcttctgtgcctggagcacctttcccttaccgatgggcaaggcgctctccccgctttctttgggcctctgctccaaggccactttcttaggcacaatcctgtcttctgggtcctcagcttctttgccctcttgcctctccaaagaggaacttacttgttcagcttacttgttctttgttctctattttcaaagcctaacttccttgttctttgtacctccttacccctagttacggtaaacaaccttcccgcgggtcctaatctataactcacatctgttcccttggataccctcgctacaattgccattcccgcggaaactcttcttcctgccgaaaccgcttgccctaccactgtagcccacatttctgctccatttgaactagccaatcgggattagcttagattgcgcagtccagccccagccaatgggaacaggacacagaagcagcgactaaccgcattagggataaaaaccccttctctcttttgttcggtgtgctttcctgaagaccagatgtgtgagtggcacccttctgcagaagtaaattggctttgctgaaaaatcttttatttcagtgctggttttccttgagacttcgagctttaatttccaacaccaccgtgggacactcttcccttcctcttcctctgtcggcccctgctcattcttcagctctcagttcaggtgtccctttctcaaggagaccttgagaaggtgcccaggcttagtcaaaacccctcttaatcaggttatgaacagcacaaagtccagtcttccctcaattgacacaatagttgctttcctggaaaattcggtgtcttattaacactgtgcaagaaatcctttaagtttatatgacaaacgagttagggcttgggttaggttattaggagcatggttgcagccacaataggccctggcaggaggcatgggaggagggtcctttctttgtggtgtgagactctcctttctattgcaaggccacccaggaccagccccggtccctaggacttacccctttcatcattgtgtcaactcgaaatgcaccccaactttccaggaagtccaagaagctagaggctcactctggacctcacgattggcaaccagtaaggtctttctaccctggaaactgacaacgactaaccccagcttaaagatctgcaggcgatcagctcctcaaggtccagttccctggctggtattggagtcattgaaactcattgtcaccccccctcttcatttttgtgccatcagggaaagctctttgttcggccagagggtccctgatccctcttctagaggacttgagggcatcctttcccataacactacctggcagctagtgtttactgagcacttactatgcccctagacactctgcaaagagccttagatacactaactcatgcaccctatgaagtgagttctattgttatcatttccattttgcagatggggaaacctagacttctaaagagttttgaatccaggtatggcacagctcctgagtctgcttctaaccgctacaccacactgtctctccttagactgcaggactgtgctggtcacttcctatggctggtttctggaagcagctccagatgacccaactggagtttaaggcaggggatgtgagggcatgaacttgaaactacatttacataacacttatctaagtgtccttaacaaaactagagaaggaggtgctgcaggctcagctttagctccactctcctatgtccaaccacaccagcccccaacctccagccccatcccacccaagccccatccccaaattctaccaccacgaccacctccagcctcacctctacctcacagatccgccaccagcacctgacccaccccgccccactttcccttctaactccaccctcagtactaaatgcaccccaccctccaaagcccactttcactccatttcacccccagccccctccgggctcatctccatcttccttcccactccagtctcaccccagcccctccctttaatcctatcttccaccacctcccgccccaccccagccttcctttggcaccccctctgccgtgtcctcactggtggtgacttcactttgggcaggagctgtgtgtacccaggactggtgtctcctctgaccccctactccagtcccctaagcgctaaaccctctatagcttagggggccaggggagctgctaggtggagcaaatgattgatttctcagctgacattcagaccttccagaggcccctatacatggaagctgccggtaccactcacccttctctactacctcagcctcagcactgccttcttctaccactcttcttcacaaaaggtgacagagcgagactctgtctcaaaaaaaaataataataataataacaacactaccactgcctcagcaaagttgggactatttgtctctcttttcacaacatcttcaactaatgacaataataataaaataacagtactgccagccggtgactaatgcttggttgcattagtcagcagtgagaaccaatgaaaactgcaatgagattcccttttgccttatccaactggtaaaacatttacaagtctgactgttagagtaggcagatagccagaaataagcaggcaagggagcgtttgggaaaagaagtcctggagactccattcactgacagtcagcgccacccactggcggccagcaaagagacaatggctacactggcaacttctggccttgtggttgggctcctctggccctaaaggggacttatgaggccttacccagagataaccatggtagggactttcccactgacgagcatgtgcactcctccagtaactcgccctacagtagccttttgctcattataataacaagccgggcacagtggctcatgcctgtaatcccagcactttgagtggccgaggtgggcggatgacgaagtcaggaatttgagatcagcctggccaatatggtgaaaccccgtctctactaaaaaaatacaaaaattagccaggcatggtggtgcgtgcctgtagtcccagctactcaggaagctgaggcaggagaatcgctggaacccggaaggcagagattgcagtgaactgagatcacaccactgcactccagcctaggtgacagagcgagactctgtctcaaaaaataataataataacaacaaaacacacccctgagtggagattttaaatgctaatgagacaggcaatgtgtttactagcgcgtacaaacacacaacattcacagccagggggaccacctaaaacatgattgtaagtgacgctccctcatgcccctgcacgaataatcatgtaagattctcataaagagggtcccccagcaccagctgctgctggctcgttctttcagagtgtactgtctctttaaataaacactgctactgctgttttttgcctgatgctgttttccagccaggtcagcccactcctttctaggaacgtactttatctttcttcaataaactctgctacttcacctttgctgtgtgtctcttggctgaaatctttcttccaagcagacaagaactgaagattcccgcacttccctgtaatgtgaccataggaaatattggcataagcctgaaacaacaggaattttcctgtgtctaacagcagtatatgttggcttaatggcattggggcatgatttggccaatctagtggagttgaagaagcacagaacctgtataaccctccagttctacttgtgggtgtgtgcacttgtgcatgcatcaggagacacagtgaaactgtctctgtttgggatagcgagaaactggaacaactaaggtctccatccatcaacagaaatcacaaatgtaatatgttaatacaatggaatactatacagttctgaagatgaatgaattagagttacaggtaaccaacctggatataactcaaatgttgagtcagaaagcaaggttgagaatgatctgtgtagcaaagtgccattaatcagtgccatttagatagaatttagaaatgtgcttgactaggcctggcattccccactttctcaggccaatgacatgtagctgctctctgggcggtgtgtcttgtggagaggacggactattcttgacctggctggcacctcctctcactgcaccccgataccgccaccccaatactgcatgcagcagggctgccatccttgggttgtcaggttataggaagcccctgtcaaatggtgtttgctccttttcttcctccagctctaggtctaacctgcagggggaaatggagggtcctcgagcccgaggagagtggcgtgaatagacctatctctcacagggagcagtcacaaagtctgggactttggcagccttgatgggggttccttggggcaggaagagcatgggacaagaaccatgggaagggaaggaaagagctaaagaagagctgcaggaaggagaaaacagaaggggagggagagaaacggatgccctgattcagggatcttggagtgtagtcactgacatcaaggcatcagatctgaaggcccaggcaggacatgtaatagtggcctgttggcccttagtgggggctgtggcatgccccctgctctgtctttggtgggtcatctcacctgtgcaatgcctggggccccaaagcagcagaagggctgggctgaggagttctgtctcccatccattccccaccctttctatctgtggtcagcaggtttcccagagtccccacgaagggccttaaattgttcatcttttgttatatttgtcttctttagtggacttgcctccaccttgctcccctgccatgtccctataagtccctggatccaagcagggccaactttctataggattttacaactgagtctgtggtgagtagggtcatctgacttctgaagttgcccgataaggggcccaggcactgtaggctgccatgctccttgtcatggggaggatagtgactacagtttatagttagaattgcataacaatagcctaatgaaataatgtaactataataattatttagggcttcttatgtgccaggtgctgcacatataccaatgcattttagcctcaaaactacctaataagggagacacgcatgttattaccagtttatagacaaggaaactgagagaaacaaactcacccaagagataagtaggagaactggaatttgaacctgcacagccagatttccgagactgtgtgcttcatctctgccatgtatgtagttcaggcgtttacggggtctaatacaggccaggcattctgcttggtgtttgctgttcttgtgcaagtcaagcacgctcctgcctcaggacctttgcattcgctgttccttgtacttttcagctcttcccctgggtatctgcagggctctcttcctcacctccttcaggtgtctgctcaaatgtcactttatcaggaggcctcttctgtccaccctgcataaaatagtgtcacttcccctttgctctggcaacttccttccccctcctcctgcgttgtgaaggccctcagcactcagtatagtggggcctgttactcacctagggttacttgctcattgtctgtcttctctcgggaggaggtaagctctgagagagcagacttctgtttctttctcagcacactgattagggcctggcacagagtcagctttcaaccacgtttcaggattcaatgagggtggctacaatagtggaccattaggttcctgtccccagggagctcaaattctagtggggacaactaacaaccatcaaggaagcagatacacaaacacacacgcacacacagacacgcacacatgcacacacgcacacacacgcacacacacgtgcacacgcaggcacacagatgcacacatgcatgcacacacacccacataggtgcacacacacatgcatgtgcgctcacacacacacaccacacacatgttttcaggtagcagtaagtactatgaagaaaacttaagtggcaagcaggaatgagagtgatggaggtgcttttttggatagagtggtccagagaggcctttaaaggtaagagttaagcagagacttgaatgaatcagggagctttgtgtggtcaaagtccagaggggtgctggagaagagtcagcttacaggatctggggagatgaggtcagagggggtggcagggaccagctcatgcagggccctacagggctagggggcttgcaagggcaggtgggacccacctccagttagtggagaaccacctccatgctttcctgctgtttcagcttcccgtggccgctgtaacagatcactgcaaacctgataatttaaaacaacagaaatttattttctcatatttctgaagtcccgaagtctgaaatcaaggtattggcagggccacacttcctccggaggctccagggggagaatttcttccttgattcttccagcttctggtggctgctggcattccttaacctgtggtcacatagctccaaactctgcctctgtggtcacattgctttctcttctacatcgaagatccatccgtgtctctcttgtaaggatacttaacatctcttttagggctcacttagataatccagggtaaacccccacccccatctcaagattcttaatttaatcacacctgtatagtcttgttttcttttttctttttatttttacttttgccatacaaggtaacagtcaaaggttccagagattaggacatggatatctttggggtgggggttagtattcagcctaccttccctaccctctctaatgtctggtaattcaataatttattccattctcagactaaattactgttgtcgctggcttagttcaagctgtttttctgtttgtggtaatgaaaaacatctagactcatctactcgccgctatagtgagtgctaataaatgtttgcctggaaagagaacagggaatttacatgtatcgagtgcatgcagtgcacacagcacatagtaggccctcagtaaatgcagaattgaattggttctttttttttttttgagacggagttttgctcttgttgcccaggctggagtgcaatggcgcgatctcagctcactgcagcctctgcctcccagttcaagcggttctcctgccccatcctcccaagtagctgggattacaggtgcacaccaccacgcctggctaattttttgtatttttagtagagacgaggtttcaccatgttagccaggctggtctcaaactcctgaactcaggtgatccacccacctcggcctcccaaagtgctgggattacatgcataagccaccgtgcctggtcttgaattggttcttacacaatgcagagaagtccacattagtatcctggatgttccgtgatgggaagggactctgattagtcactgagggtgcacagggaggaggcagaggcctcagggttaaaggcaggtgtgtctgactcctgggcatgcacactcttccccatgtcagggcttctcagtccactagatggtggtagcacccccccaggttgtgccaaccaaaaacatctctagacattgccaaaagtccagtgggggcaaaatcactcatcttgggaactactgccccacatcatgctgccccaggggaggtgatagtgggaagaagtgctggctagctagctgggcattgaactcaggtgtcccacagggcaggtgagaggctgtctgtatgctgctgtggtggagataactggttatcccctgatatctgccatctggtttctctagtgaaaacttgcagctgggcgcattgctgccagaaataaagactacatctcccagtgtttcttgcagctaggtgtgaccatgtgaccacattccagccaagtagagataagtgaggtggccaagttcctgactgtgcacttaaaggggagggtcctgctcccctttcctgccctcttttccagtctggctgcctagaaggtggacctggtagcaatgagatcagtgaatcctgggtctcaataccagggagtctctgtattgcttggcctgctgatggtcaactttctggttgatttccactggtttaagccactgttatttaagagctttgttatagttgctgaacctgcattctaatattatacctgcccaagccagccatgagggggatggaaggaaggcaggaaggagtggggagaaaggtgtagatggaggggcacagatggtctggctggttgagttcagagattcttacagacatctcctgggaagaagactctgagttggatgttggaggccaagaaggatgtagcgaggtggggaaaggggcagggcgcaccagaaagggctgcagcaggggcaagggtgttgaggagagactgagccagggactgaaaagcaaggaggtcttgaacaggccaaaaagagaaagggagacattttagagggaagcccggtgcaaagaagggaatttcactaggtggaccaaaaccagatgtagggatctaggagtttgtcatgaggcctgggggcacctagaggctgggactggaggtagggaaatggttgaggagccctggctcctctccaactcagagggtcctcactctggggctgacccctcactcttgacccttgctccatgctaaggtgttcatggctcctgctgggcctgtggtcttgacatcttcttgcccagggctcctccgagaggtagccagggccagtaggagtgcagccaaggtaattgccttcagccccaggaccacaggtgcgaacacaaccaggaggcctgggaggcacaggagagagctcaggcgggacccgtggtgagggccccacagcccacgcctcattgctgcccatgggcaaggtcacatcctgctgctgtataacctctggagctgtatcctttctacattgaaagaggagatcaaagaccacccttccctctgccctgggcccagagaacggttgcccaatattctgcctgcatctgtaatcatctcagtcacatccctaacctctgctattcctaattgcctaatgcaatcctcaaggtaatcctacagtgtaggatagtgatccaatttttatagataaggagacagacccagagtggggaaatgattttctcagggccacatgtgttaaagaagtcacgggacccaggccgtctggcccccatgaatggcaggagcagggccgagcatcaggaaggcaaatctgaccacatctatcacaagctcccaccagatactgagagtccttgaatgttaacatgagatgtgctaggcacagttctggacacctggcatgtgtgatctccttgagtgcacacacaaccccatgaagtagggtctctgattcttgtcccctccccgctagttcatagagtcagataccagactcaaggggcgagaacctgcccattacactaggaaggggctccatccaggaggcttagctacaaagccatgttctccagtgtcgctgtgcatagcctcacagtgtgtccctacactcagaatcacagggagctcaccacctctcaaacaacatttcccactaaacagttacatggccctggctatgagaaagttcgttatagctgagctgttataacatggttctctggggtcctagttctgcagttgagatgaagtcctgggagcattcttggtggcaggttagccccaggagtctgggactgctcccttcccatgaccaagccattcatggcccccttgcctgtgggggactcattgactccactgaggtgggtacgctcacctgttggagacatctcagttgcaggttcactggtgaattctgcctctttggaagaggtagattttgctgcaagggagagaggctttgtcatacttccctttatctttatctcccaccacttcctaagtcccaggagctgggatctctgggatgagtctgccagtttctatgtgggtatgggctagaagtcaaaccctgcagctatgaaggacaaagttagactttctactggagcacgtttagggtatggacctgtctaattcattgcagtgtctgcagtacttagcatagtgcaggacactcaacagtcatgtagtagatgtttgttgaattattattgttactattattttttgagacggagttttgctcttgttgcccaggctggagtacaagggtgcgatcttggctcactgcaacctccgcctcccaggttcaagagactctcctgcctcagccttccaagtatctgggattacaggcatgcaccaccacgcctgactaattttgtatttttattacagacggggtttcaccgtgttggtcaggctggtcttgaactcctgactcaggtgatccacctgccttggcctcccaaagtgctgggattacaagagtgaactacggtgcctggccaatgtttgttgaattattaatgatctatacagagttctgtggaaaccagaatggggagaaattaactctgcttgagaggaggagaaggttttacagaggaagggccatttgtgctgggccttgaaggatgagtaggagttttcagagaaaaggagaaagcattccaggtagagggaaaaacttatgtaaagacatggaggctgtgaagaactggcttgttcgggacatgtagaaaaattcctgttgaatacctgctccgctctcccgacaagtccaaaaccaattgtctcacctttcactttcaggctggtgccctgtccagacaggtattgcctgttgggtttcctctgaaactttacacagtaataggtgcctgcatcctcactggagacgttttgcagaagaatgctgaagtcattgttggaggcctgcaccgctgtctccttggggtgggagatgcctccaaagttgtaaatggcctcccggctcagaccagctccctggaaccacctgatgggtccagggggaccgtctccaagcactgtgcagttcagaaagacagtgtctccagtggtccccaacaccaattcctggggctggatgatccacaggtctggttcagggtccccagctcctgaagccaaagaggaggtccttgttgaattccctctcctcttccatcgttcactcatttcctacctggtgttttccctcccttccttctttccagatttcttcactcagccactccttcctgctttctttattactcaccagttgactcattcagtaaaaaagctctgagtacctactacataccaatggtaggattggggaacatgaaactcaggaagacacaagtgcccggccctgaagccattctctgtcttccagtggagatggtcaaaaaattgcccagaggcggaaacccagaagatggcaggactacagaggaggcaccatcatagctcggaagaagccagtgaagccttcctgaatctggcatcaagttaaaatgaactcccacgtacagatactctccatgtcaccagtttatggggtgtttccacaagcatccattctatttaatcacccgaatgacccttgaagtacaaattgttttgcctgtttttcaagcaaagcacttgaggcatgtagagccagggtaactgacttaagaaggaactactattcaatgacaggcccaggatttgggtattcaggtcaccataggtggacttacagatgccatgattgagtacttggggagtgtggtagatgacatgatcagcctcaggttttgactctgtgcttgtaatagggtacatccacactcttacctttggtgcatggtggaagactattcttccttgtcccttgacttggagctgagccatgtgacttgctttagccagtgggctgttagcagacataatgtgagtagatgcttgaggtgtacttgaagagttgggactgggcttctgcttctgccatctttatgagaaaacatgccccacatagttgctacctctccagcctgggctctggcatgagacatgaggagtggaaccacccagccacatgtaaatgtgcatgtagagatacaaatatgtattgttgtatgccactgaaattttgtgtgatacagcatgatacagtggataaaggtgactgtgcagggaaacagactggagcaaatgtgtggtctgcagggcctgatccttacccttcacaagcactgaggtgccttcatccgatttcatttctgagtgttcactcaaaccatcaaacctcacacagtggtaggttccagtgtgctccctggtgacattgtggatatagatggaataatcacaattcagtggttctgatgtccgttggatcatgggcattaccccagggaaggagccacgtttaaagttataaatttcctgttggtcctgagtgctcaccttcacccattttatcataccatcagtgcaggagccgaccaccatacacctcagtagaagtgtctcaccttctgccaccagcatggggccctcgggctgtagcacctgccagtcattcctgctgctctgcccagaggcatctacaaaagaggaagaaagaccttgcactgggcaggaaggacttggagccctaaatgacaagcttaaaacaatcaaaccattatctggccaagaacaatggcccaggataagacaggagtgtcattagacagggaagggaaagaggggatgagatggctggctgcagagagagaactgagctatgcaatggcaaacctacaaacaataaataacactcaagtgctcaccgtgtgctgggccctgcgtgcatgatgtcacttattcttcacaatgcttctgtaaggtaaatggcatcattcccattttttgacagaggaaactgagggtccggaaaggttaggcagctgtcccaggatcatcggctaggattgtgtctcccgaatgcacatgttgatgtcctaacctccagttcctcagaatgtgatgtatttggagatagggtctttaaggaggtaattcagttaaaatgaggtcattggggttgggccttaatctcacccaactggtgtccttataaggagaggaaatttaaacatacgcatgcagggggaagaccatgtgaagatacagggagaaggtggccgtctataggctgaggagaggcgcctcagacaaaccagccctgcagacatcttgatctcagtttccagcctccagaattgtgagaaattacatttctattgttcaagccgcccaggccatgctactttgttatggaagctctggcacactcagacatcactcagtaagagggtgacaggcttgattcaagccctctcaacctgtttctggagctctggctattaatcttcaaatgccacccttcagagacataggtttgtgtgttgcggggttcagtgtaaataccctttctgcctcatgtgaattatcagcagactgcagttcgtgttaatgtgttatgaagtgaggctattttgaagataggttgaactgttgagtttatcctcaaagtggatacagagaaagagggctgaggcctcccatggatattctgggtaacaaacatcatcacatgtattccttctaagaattctgtgaggtagatgctgttataatctcaattttaaaaacttccccatttattatttatttattttttaattttttttgtagtgatggggtctcactatggtgcccaggctggtctcaaactcctgtgctcaagtgattccttccccttggcttcccaaagtgctgggattacaggtgtgagccaccatgcccagcctataatctccattttcgagatgagaaagaaaacgaatgctcacagtggtaaagaaacatgaggtgaaccatgcattcagtagatatcgtgtccaggatttgaactcagatcaggtgacttaagattctgctcaactcaaggtcagcagctttgtaccccgagtttcctttttgtctgtattcccatcagcctttgtgaatagctcagtctcactccacacatttgtttgcagtatatcatggtgtttctcagttgtgaatgaggcaaggagagtaagaaggtgaagcaaacatttccttctaagagggtctaggaaagacttatggaattctaaattctatttctacctatcttcagctaggcatgtgctgttaaccaccaagaataactttctcacaattgtgaccaagtgataaccgcatgttgaatcctagggattgcttctgtccttgatgtccttagttccaagaaattcagcgacatccactctcaaacattatttgagctagtcagatctgttatcactgatccttcctgtttttttccctggcctcagggagtttcctcacacacacgtacaggactgtgcccatcactcagcacagggctaagaatggtgcctgttcccaccagccaaactggtaaaacccatgattgtcagggcactggggaaagtccacagaagagagatgcagcccagaaagaagtgttctggtccacccaacaaatcttaaaagcaaggccccaaactgattttaaaaaaaaataacattctattgtgaggcttctaacacatgtatatgtagaagttatgacatcgatagaataaagactgggagtggagaaatgtgagtttactactgtaagtttcttttttttctggtatccatcacctgagtatttattatttctatgtgttgggtacattgcaggtcctctttcctagctgttctgaaaaacaatacattgttgtgaattatagtcaccctactctgctatcaaacattaaaatttgttccttttatctaactgtgtgtttgtacccattcaccaacctcactcttaacccctctccctgagacccatcacctttcctagtctttggtatctatcattatagtttctacttccgtgagatcatttttagcacctgcatagttgtctttctgtgtctggctcactccttccttccttccctccttccttcctttctttcttcctttcttccttccttccttccttcctctctctctttctccttccctccctccctccctcccttccttctttccttctttttggagtgcaatggcactatctcggctcactgcaacctccgcctcccaggttcaagcagttctcccacctcagcctcctgagtacagcttacttcacttaacataataatctccagttccatccgtgttgctgtgaatgactacatgatttcattatttttttttcacggttgaatagtattccattgtgggtgtgcttggggacactatatatatgtattttttttatcaattcatccattgattgacgcttagattgattccatacatttgcaattgtgaatattgctgcaataaacgtagaaatgcatgcactcctttgatatattgatttcttttcctgtagataaatacctgttctaggattgctggatcatatggcagttctatttttagatttttgagaaatctccatactgttttccatagtggctgtactaatttacattcccaccaatagtgtataagagttcccttttctcctcatcctcatcattttttttttttttttgagagggagtcttgctctgtcacccaggctcgagtgcagtggcaccatctcagctcactgcaacctccgcctcctggggtcaagtgattctcctgcctcaggctcctgagtagctgggattacaggcacatgacactacacttggctaatgtttgtatttttagtagggacagaatttcaccatgttggtcaggctggtctcgaacccctgacctcaggtgatctgcccacctcagcctcccatagtgctgggattacaggcacgagccacagcacctggcctttttttgggtctttttaacaatagccattctaactgggataagacgatatctcattatggttttgatttgcatttccctgatgagtgatgttgagcatattttttcatatacctctaggccatttgtatgtcttctttgggaaatgtttattcattcctttcctttgctcatttttaattagattatttatttgtttgtttgcttttttaactgttgaattgtttgagttccttgtatattccagatattagtcccttgtcaaatgggtactttgtgaatattatctctcattcaggaggttgtctcttcactcttttgattatttttctgcagtgcagaagctttttagtttaatatagtcccatttgtcttttttttgcctttgttgcctgtctttcgaagtcttagccacaaaacctttgcctagagcaatgtcttggagtgttttctgatttctttgtattgtttttcagaattatcttgtatcttactgatcttccttagtatcgatattttgtgttctttttctgggattttgtaaatttcttcttgattgggatgtgtattggtataatagaccaagggcatagaatacatagaccaatggtataatagaccaatggcacagaatagaaaacacagaaataaatccatgtatttacagccaattgatttttggcaaaggtatcaagaatacacattcaataaatggtgctggaaaaactggatatccatatgcagaagaataaaggtagactgctatttctcaccatataccaaaatcaactaaagatgaattaaagatctaactgtaggacctaaaactataaaaactactaggagaaaacagggaagggactccaggacactggtataggtaaagattttatgactaagacctcaaaagggtcaggcaactaagacaaaaatagacaaatgggactatattaaactaaaaagcttcttcataacaaaagcaactatcaacacagtgaagagacaaactcttgaatgagagaaaatatttgcaaagtactcacctgacaggggactaatctaatatccaaaatatacaggaaactcaaacaactcaacagttaaaaaaaatctcattaaaaagtgggcaaaggacatgaatcaacatctctcaaaagaagacatacaaatggccaacaggcacatgaaaaaatgctcaacattactaatcatcggggaaatgcaaatcaaaaccacaatgagatatcatcttaccccagttggaacgactgttaaaaaggcaacaataaaaaaaaaaaacaaaataaataaacaaaccaccacaaatatatgctggtaaggttgcaaagaaaaggaaactttatacatggttggtgggaatgtaaattagtacagccactatgaaaaacagtatggagacttctcaacaaactaaaaatagaaatgccatatcacccagcaataccactactggatggccagtatggaatactatttggctataaaaacaaatgaaattctgtcattcgtagcaacatgaatgaagatggagttcattatgttaagtgaaataagccaggcacagaaagacaaacatcacatgttttcactcatacgtggaagctaaaaaaattgatctcatgaaagcagagggtagaatgataccagacgtggggaaaagtgagtgtagggagaggggcatgagagagatttgttaatgggtacaaacatacagttagatagaaggaataagatcctgccatttgatatcagagtatggtaactgtagttaacaacaatgtattgtagatttcaaaatagcttgaagagaggacttaaaatgttcctaacacagataaatgaaaaatacatgaggtgatggatatcctaaatactttgactcatttattacacatcctatgcatggaacaaagtattacatgaaccccataaatatgtacaaatgttatgtatcgattaaaaaagaaaaattggaaaatattttgaactgaaggaaaatgaaaacataatataaaaatttgcgggattctgttaaagcaaggggaagtttgtagtattaaatgcctatatttggaaagaagaaaggactcaaataaattacccactttccaccttaagaaactagaaaaaaaggccaataaactaaactcaaagtagtgaaagaaaggaaatcatcaagctggaaatgaaacttaatacagtagaacacacacacacacacacacaccacacacacacacacacacagaaaaaatcaatgagaagaagaaaatctttgagaagatcactaaaactgataaatctctagtcagattgaacagaggggacacacacagaaagaacctaaattattaaaataaggaataagattggtgatactactacagattttactcttattaatagaataataaaagaatattatggaaaacttcaagtcatacatatttgacaaattaggtaacatgaacaaattccttgaaaaagatacactgccaaagctttctcaagaagaaaaagacaacctggttagccctattatctattaaaaagttcaatctgttattaaaaatcttcccagaaataaaggtccaatccaagaaagtttcatttgtgaattttccatatctttttcttttcttttcttttcttttttttttttttgagacagggcctcactctgtcacccaggctggaatatggtggcgtgatctcagctcactccaacctctgcctcccaggttcaagcgattctcctgcctcagcctcctgagtagctgagattacaggcatgcaccaccatgcccggctaatttttatatttttggtagaggcagggtttcgccatgttagccaggctggtcttgaactcctggcctcaagtgattcgcctgcctcagcctccaaaactgctgggattgcaggcatgagtcaccatgcccagccaaattttccatatctttaagaaagagataataccaattttatacaaatacttttagaaaattgaaaaaaggagcatacttttctaattattctatgagtcccagtgttatcttgaaaccgaagccttttcctttcgagaaaggaaaatcaatatctctcatgaacatagataaaaaattttacacaaaattttagtaaaccgaattcagcaatcagcaatatttagaaagtataatacattataatcaaattgagcttatccctggaatataaagttggtttaacattcaaaaatcaatcaatgtaatttaccatattactaaactaacacacacacacacgcatatacatgcactcatataatcatctcaacagaatgcagaaaaagcagttttcaaacttgaacatgcattcctaataataactctcagcaaactgggaagacaaggaaggtttttcaagttgataaggggcacctgtgaaaaccctacaacaactctatcaagcttagtggtgcaaaaatcaatgttttccctgcagatcaggaactagacaaagatgcctgtttttactatttctattcaattttgtaggataggtactaactgtgaaaaaggtagtaggaaataaaagacatccagatttgaaagaaaaaagaaaactgtctttatgtgcatatgacataattaaaatttaaatgaaaatttcttaaaaaggctactagacctaataaatgagcttagcaaggtggacgataaaagatcaatgtacaaaattatatgtattactatacactagcaataaaccacttgaaattggaattttaaaatttccagtcatcaatgttataaaaatagaaaatatttagccaaaaatgtaaaggaactgcaaactgaaaatgtataagccattgctaagataaaaaaaatcaagcctaaataaatagagaggtacacactgttcatatgttggaagattcaatattgcttagatgtcaattcttctcaagttgatatataaactcaatgccattcccattcaaatcctagcaggcttcactttagcattgataaactaaatctaaaatttatagaatagccaaaaccatttgaaaaagaataaagttagaaaactaataccacctgctttcaagacttagataatgttacagtaatcaagacaatgtggtattgcacaaagatagataaacatatcagtggaactgaatagagagtctagaaatagtccatgcaaatagaggcaactgattttttaaaaagagatgaggtctcgctatgttttccaggctggagtgcagtgctattttgggtgtgatcgtcatagcacactgcagcctcaaactgctagtctcaagcaatcctcctgagtagctaggagtacaggtgcatgccatggctcctaactataattatttgatatttgacaaaggtgcaaagacaattcaatggagaatggggagttttttcaacaatggtgcaagaaccattggaaatacatgtgcaaacaaatgaactttggtttatatctcaaactatataaaaattaactcaaaatagatcatataactaaacataaaatgttaaacgatacaacttctagctgcaaacatggaaaaaaactttgtaactttgggttaggcaaagatttcttagatgtaacaccaaaatcatgatccattaaagacaaattgatgaattggacttcataaaaattaagaactcctgctgttcggaaaacacttgtaaaagaataaaaagacaagtcacagagtaggagaaaaatctttgcaaagcatatatctggcaaaatatttgtatccataatatataacgaactctcaaaactcaataataagaaacacacttaaaaaatgagagtcgaatagacacttcaccaaaaaggatgcatgatgtaaaaaatgttcagcatcattacatattagggagttaaaatcacagtgagaggttggtaatcctaggacttcgggaggctgaggcaggcggatcactggatcccaggagttcaagaccagcctgggcaatatggtgaaattttgtctctaccaaaacaaaaaaactaaccaaccaaccagacaaccacaaaaattagctgggtgtagtgatgtgcgcttgtagtcacagttatttggtaggctaaggtgggaggatcgcttgagccagggagatggaggttgcagtgagctgagatcaagccattgcactccagcctgggcaacagagtgagaccctgtctcaaaaaaaaaaaatcacagtaagatattactatgtacccattagaatgactaaaattaaaaagattgaccataataagtgttggtgaggaggtgtaggaactgccatcctcctacattgctgatgagaatgtaaaatggtacaactcctttgaaaaacactttggcagtgtctgaaaaagttaaacgtatggcaaccatatgatccattttattctcagatatttccctaagagaaatgaaagtatatatccacacaaagacttgtacatgaatattcatagatgctttatttataatagccctaaactgcaaacaacccaaatgtctgtctacaggtgaatgggaaagggtttatccatacaatggatagacatgagaagaaatgaactattgacatatgcaacaacatgaatgaatctcaaaataattatgcggagtaaaagaagccagccaaaaaggagtataactgtgtgatccttattatatacaattctagaaaatgcaaactatagtgacagaatacagatccgtggttgttttggagacaaggaggagtggcaaggacgaatcacaaggaaacttttgggcgctggatatgttcatgatgctgattttggtgatgatttcacaagtgtgaaatacacccagcactcacaaaaaaaacttatcaaattgtgtactttacatatgtacggtttaatatatgtcacttacacttcaatagagctgttaaaaataaattatttgtaaagatgaagcctgcgtgtgtgaggagaaagaagcaatggaggagaggaagaaggaagcactcagaaagtcttatctcagctaggggtgagtctggggaagtgaacaccagggaagaagctggagcctggactcagtcctggtgcccacaccccttccctccctctccccttctgagtccccttctgtgttgtcacttgggctttaggaggtgtcctaggaggtttgcctctgccttgtcagtggagctggaccttctcatctattttccatctgcatcctctgcctttcatggttcctgtatggggctccctttaaaagccttatagaaaatgtgttagccccagtctcctctactgcaaaataggggcactcatatttttctcggggctgctgtgagtattaaatagagaagtggtgaggctcaatcctgggccagctacgtaatttgtgaggccaagtgcaaaacgggaatgcaggtcccttgttcaaaaactattgagcaacacagcagaacattaaaccaagcatggggcccttctaagcaggaggctctgtgccactatatagagggcacacccaagaaccagccctgactcagcttgagatgcagctggactcaaacattccaactgactggtttaagcaacttctcttattttccatctattctattgcaacaatcattggggaatattttttattctgagtagtttagatttctgatttcctagtctagtgcctaaaacatagcagacactcaaaagtacctgtggaatgagacctagcaattatgattcacatcttagaattgaggaaatcagcttagagaattgaagtggtgtcttgagtcatacggccaatgagtaagggagcacctaggtccgaccccacacctgggttctgccaggatctctcctggggatggccaccccggaggaccaaagatgtcatggacagaatctagatctcagtagagcctggagcagaggcccagatgggcaggagatggaatgagcccactgagagccaagtatccctgcctggtagatcagagagttctggactcagaggctgagctatatattcaggggtctcaagactctggagctaacctggcctgcccctgagttagaggaaacatgggaatgataataataatcgccaagagttatcaaatctttgttatgccaggcacttatgggtattatcttgttaaattctcctaagaaagtcccaaggtgggtcctatttttagctccattttacagttggaaaaactgaggctcagaaagaaattacttaaactggttagtggtgaggtttgagcctactgcgtcttaagctgagccagggctggttcatggctgtgccatctatgtagtcgcacagggccctgtgcttagaaggagcccatgcttggtttactgctctgctgtgttgctcaatactttttgaacaaaagaccgcagttttcattttgcagtgggtctcataaactatgcagccggcccagggctgagcctcaccacttttctatttaatactcacagtagccctagagaaaggtcccatgagcgtccctgttttgtagaagaggctcctggggctaaaagagctgcagcatctgacgtgggcataggagcaatcaagctggaagccagtgggtgtgagcgcagagcctgggagcttatcacttcactacgctgcttcttgggacactgggggtgccctctgccggagtcaggcaaattttcagtggacccctctttactctatcttcatggggtcaagcttcttcaggcatggcagagcacttagtgcccctctagggactgaccagccgggggtggaccctgttctatcctagaccccacttacctgaggggacaaggaccagtgccagcagcaggaagcagggaggcaagtgggccaggcaggtgggggccgacatcgtggagcacatggcatcttctgtggtccccaagacttggggctcctctgctctcttgtgagtgttggagtctgaggcggggcccgtggacaaggcagtttctgcgtctcttggccacagctgcttggggaagtgttttcattgcagcaacacaaggctgttggtgcaataggaaggagcccggtcaaagggtttcctgcttttgtgtctgggctgtgattcctgtagtcactgtgctaaaaccttgccataggctccatcctaggtgcccgggagggaggtgggcactgaggtcataggacgcactccagaatcgggtggaatttggagcaaacattggatcttcctcttcttggctgtgcaagatttcaaagtcacttcccatttctgagccttttgtttcttcatctgcagcgtaggaacaacggcagttccctcctcagaacagttttggtaagattatgagaaataatgtgagggcacagaacaatgtaaatgctaaacatattaaccattattattcatgatgtgcagaaagtagaggaggtgacattgcttaagaagaaggatttattataaagcaagccccatgggggcctccttttagcactgcagggagggtacaggcctaattcctaaaagtataatcatgtgtaactctctcagcctctgtttcctggggtccaagtgaaacatactcagattgtgcaaacatttgcgtttgtggcatctttgtttcctgtaagtgatctgaacttcctcaggagcctcctggtgctggctatcaagaaggaaaagcttaatcttgccaattcatgcaatccaggcaatctctttagccacactgtctgggttcaaatcttggctttactcagtctggctgtgtgaccttaggacaatcatttgaccactttatgcctcggtttcctcatctgtaaaacaggaataaaaatgtggtagcatgtgtggggtggagtaagcactctataggctttcaccattgtcttttaggttaactcagtcttttaattaactcagggaaaagtacaagaacaactcagcctttcattatttcacttcctccctcatgcttcagaaggttctgggtgcagaggaagctgaagattctccagcaacagggtggcaggccttggatctgagtatgtcccctgggtcccagaggtctggtgtctactatgaggaggttagtctggcctggtccccaaggactttgcactgggtctgtgactggtcttttctagacttttgaggccttgcattgatacccctgctcaattccattactccctctacttgttctcctgtcaatgagatctatatagtgaaacttctttgaaagggccacaagcctagatgattccaccagaccctcagtactttccatgtcattcttacacgggaatttctgaatcacctgctcatctatgcagatttctttctcagctattgtttttttctaaagttttacttacaaataattttattttaataggcaaggcattgtattggttagctattgctgcataacaaagcaccccaaaatttagaagcttaaaaactaaatgttcagttaatttactattttgtgggttgacaattcagtcagggctccatttggtggttcggtcttctcatctcagcagattttggctgggaatgttcatgcacttgaggtcagctgcaggttggctaggtggctttgttactgcggttgactgattgttaacccaggtacctcagctgtcctctatgtggtctctcatcttccaggacactaacttagtcttgttctcatgaaaggggcagttttgagagacagtgcaaggtacaaggaaacttctgccatattcttttggccacatcaagttacaagaccagacaagattcaaggaatggaaaatagactttgcctcttgttagggaactgcaaagcctaattgcaaaaggtgtggatacaaagagggggtatagaattgtggatatttttgtgatttatctgccatgggcatctacaggtacaaaattcagaggtctcagtgtctcatttatagggctcccagacattactttccttagggttaaccacagtcaccagtttttgaagacattcatttcctttactgtttctgatctagtgctcagaagccaggttgaatatggtttctttgtgatgtcgtggactatgaacaccctgggaagacaggccatgatcccttatgctgtaggaatccctaaactccattcccaccccaccccagcatttggacctcaggactgtggggttggcaggactctagcatctcaacccctgtcttctccctctttttcttacttcctcaccaagtcataaggggaggagttccccttcttttccttctggtagggactttcctaatctcagtcttcttcctaacagctggccttctttgttctagatggaatccctcctgccccttcctcaagacagcaagtctcacactccagcttagaataggaaaaaagcttccagggaaggaattaaactgctgggaggtggagaaatgcaaaaggaaatagttaaaaatgttatatctgtcacgtcatctataaaacacatgaaatgcgattgcgcgtgaagcactggcttgcgataattgctcagtaactaggaacagtggcattcctcctggtcagtgtgcttgggtatcacatgaactatagtgtctattactagcctgagttaagttatcctcaacaagagcacccgaggtatatatagaacacaagtctacccataaagctttttttccttccactacaaaaatggaactttgttaaaacaacagctttttgattgtttaccataaaatggaaaacatactaagcaagcacagggaaagcgttcaaccttagcagcaatcaagtaaataccagtcttaaaaagagcaacactggtgtctttgcaatcagcatctatctccactttttctatgctctcctctttttttggaggttctaaaagcctaagaactgcattttctgtaactctttaccatcattattctaggagagaataatgaaccaaggagaggttcttgcttagatttggaaggtaaaaggagaggcatgcttgcttctctagccatgaagagggggcagatacgtgagaattggtggatttaatttatgcaaatgtgaggttttgcagtgctgcctgtcttctataaatcacctctaaagcacaggcagctggcatcattagcagcagtttctgtgagtctctcagattcctgattttccaagagctaccagtgaacttgagagataaagcagtgaggatttccgatggtctgtaaacaccaaatgccacaagtcccatgagaaccaagcatggctttttatgaccgaacacaaaagtcatccagcctcatttcttctcttttcatttaggaggaagcatttagtgtctcaatactaaagtctctaaggtcctcgaacttgattttctgctattggcaatttgtcctgccttgtggcttggtttgcctttcttactcccttttcctgtttcatgtcaaatcccatggcttgctttttggtgtttttgttttaaatttttatggagttctgacttacatacagaaaaaggcacaaacatttaaatgtgcagttcagtgaatttttagacttttacatccatatacatctgtgtaataaccaccccaagatgtagaaagttccttcttgtttcattccattcaatctctggccccagaggcagccacctctgatttctatcaccatagattagttttgcctgtttttggagtctttaggtttttccaaatataagagcatatcatctgcaaacaaggataatctgacttcttcctttacaatttggatgccatttttttctttctcttctctgattgctgtagctaggacttccattactacactgaataacagtggtgaaaatgggcatccttgtcatgctccaggtcttagaggataggctttcagtctccctcattcagtacgatactagctgtgcgtttgtcatatatgggttgtactatgttgaggtatagtcctcctaaatccagtttttttgaggatttttttatcatgaagggatgttacattttatcaaatgctttttcagcatcaattgaaatggtcatatggtttttgtccttcattctgttgatatgatgtatcacatttattgatttgtgtatggtgaactatccttgatgcttgcatcccaggaataaatcccacttggtcatgatgaatgagctttttaatgtattgttgaattcagtttactaatattttgttgggattttttgcaacaatattcattagagatattggtctgcagttttcctttttctatgtgtttttatgtggttttggcatcagggtaataccggtctcatagaatgagtttggaagtattcgctcctcctctattttttggaatagtttgagtaggattggtaatagttcttctttaaatgattggtaaaattcagcagtgaagccactgtttctttactgggagactttttattatagcttcaatctcgttacttaatactggtctgttcaggttttggatttcttcatggttcaatcttggtaggttgtatgtgtctaggaatttgtttattctttctagattttccaatttattggcataaagttgctcctaatgatgcttggaatttctgcagtatcagttgtgatgtctcttttttcattgctgattttatttggatcttcttgctttttttcttagtctggctaaaggtttgtaaattttgtttaacttttcaaaaagccaactttttgtttcattgatcctttgtgttgttttatt

SEQ ID NO: 98 - DNA, 1433 bp, Homo sapiens
  CDS (179)..(796)
gcgatagctgagtggcggcggctgctgattgtgttctaggggacggagtaggggaagacgtttgctctcccggaacagcctatctcattcctttctttcgattacccgtggcgcggagagtcagggcggcggctgcggcagcaagggcggcggtggcggcggcggcagctgcagtgacatgtccagcatgaatcccgaatatgattatttattcaagttacttctgattggcgactcaggggttggaaagtcttgccttcttcttaggtttgcagatgatacatatacagaaagctacatcagcacaattggtgtggatttcaaaataagaactatagagttagacgggaaaacaatcaagcttcaaatatgggacacagcaggccaggaaagatttcgaacaatcacctccagttattacagaggagcccatggcatcatagttgtgtatgatgtgacagatcaggagtccttcaataatgttaaacagtggctgcaggaaatagatcgttatgccagtgaaaatgtcaacaaattgttggtagggaacaaatgtgatctgaccacaaagaaagtagtagactacacaacagcgaaggaatttgctgattcccttggaattccgtttttggaaaccagtgctaagaatgcaacgaatgtagaacagtctttcatgacgatggcagctgagattaaaaagcgaatgggtcccggagcaacagctggtggtgctgagaagtccaatgttaaaattcagagcactccagtcaagcagtcaggtggaggttgctgctaaaatttgcctccatccttttctcacagcaatgaatttgcaatctgaacccaagtgaaaaaacaaaattgcctgaattgtactgtatgtagctgcactacaacagattcttaccgtctccacaaaggtcagagattgtaaatggtcaatactgactttttttttattcccttgactcaagacagctaacttcattttcagaactgttttaaacctttgtgtgctggtttataaaataatgtgtgtaatccttgttgctttcctgataccagactgtttcccgtggttggttagaatatattttgttttgatgtttatattggcatgtttagatgtcaggtttagtcttctgaagatgaagttcagccattttgtatcaaacagcacaagcagtgtctgtcactttccatgcataaagtttagtgagatgttatatgtaagatctgatttgctagttcttccttgtagagttataaatggaaagattacactatctgattaatagtttcttcatactctgcatataatttgtggctgcagaatattgtaatttgttgcacactatgtaacaaaacaactgaagatatgtttaataaatattgtacttattggaagtaaaaaaaaaaaaaaaaaaaaaaaa

SEQ ID NO: 99 - protein, 205 aa, Homo sapiens
MSSMNPEYDYLFKLLLIGDSGVGKSCLLLRFADDTYTESYISTIGVDFKIRTIELDGKTIKLQIWDTAGQERFRTITSSYYRGAHGIIVVYDVTDQESFNNVKQWLQEIDRYASENVNKLLVGNKCDLTTKKVVDYTTAKEFADSLGIPFLETSAKNATNVEQSFMTMAAEIKKRMGPGATAGGAEKSNVKIQSTPVKQSGGGCC

SEQ ID NO: 100 - DNA, 787 bp, Homo sapiens
  CDS (48)..(545)
cccgttttgcagacgccaccgccgaggaaaaccgtgtactattagccatggtcaaccccaccgtgttcttcgacattgccgtcgacggcgagcccttgggccgcgtctcctttgagctgtttgcagacaaggtcccaaagacagcagaaaattttcgtgctctgagcactggagagaaaggatttggttataagggttcctgctttcacagaattattccagggtttatgtgtcagggtggtgacttcacacgccataatggcactggtggcaagtccatctatggggagaaatttgaagatgagaacttcaccctaaagcatacgggtcctggcatcttgtccatggcaaatgctggacccaacacaaatggttcccagtttttcatctgcactgccaagactgagtggttggatggcaagcatgtggtgtttggcaaagtgaaagaaggcatgaatattgtggaggccatggagcgctttgggtccaggaatggcaagaccagcaagaagatcaccattgctgactgtggacaactcgaataagtttgacttgtgttttatcttaaccaccagatcattccttctgtagctcaggagagcacccctccaccccatttgctcgcagtatcctagaatctttgtgctctcgctgcagttccctttgggttccatgttttccttgttccctcccatgcctagctggattgcagggttaagtttatgattatgaaataaaaactaaataacaattgtctaaaaaaaaaaaaaaaaaaaaaaaaaaaaaa

SEQ ID NO: 101 - protein, 165 aa, Homo sapiens
MVNPTVFFDIAVDGEPLGRVSFELFADKVPKTAENFRALSTGEKGFGYKGSCFHRIIPGFMCQGGDFTRHNGTGGKSIYGEKFEDENFTLKHTGPGILSMANAGPNTNGSQFFICTAKTEWLDGKHVVFGKVKEGMNIVEAMERFGSRNGKTSKKITIADCGQLE

SEQ ID NO: 102 - DNA, 749 bp, Homo sapiens
ttttttttttttttttttttttttttttttttttttttccagatgaaattccaggcttttatcaaaagcaaaagtttatccctatccaaaaatgaaattatacaaattcatacatatggtaaagattctagctgcctcttaaacgagacaaattttcagcagaggggcccaaaacaaaatggtcctagccctctgaagtaaaaatatttatgggaaaaatcagtttttgtaagaaagaaaaattaagaatagtctctctcccaggccatagagcttcctttgtccaatcaggttggatcatgccaggggagatcagcttgctcaaaagtcactatttaacgaagaaaaacataaatcctttcagagaagggacactcagaaagaacaggtgaggagtgtgtaacatcaaaccaaaccaacctcatttcaaccccactcagggcctctctgatgcaatcccaaagttagcagtggcaatgcaactttcagaccgggagagctctgactgcctgttggatactcgagtcacagtccatggggtgttttgttattggccaatgtctgttaaccattaactctcttcatgattgcaccagttagaccatttgccctgatggggggaaaaagaagaagaaaaaacaaattagaagaaaaaaagtgacaagagaaagcaagctgctaatggccgatcccaacacactttctgggagacagtagatgaaatcacagccacagtgaccacatgctgc

SEQ ID NO: 103 - DNA, 863 bp, Homo sapiens
  CDS (173)..(829)
ggaaagcgtggcggctgctgctagagcctttccctttaccgcacccaaggagctggagcgacaacaacgacgtcgtttccgtttccaccacctcttcctgttcccgtccttgaggacgccgtgccgggtcagtgttagcctccagccctggttgtggaaggcgacagaagtcatggcgatgtttgagcagatgagagccaacgtgggcaagttgctcaagggtatcgacaggtacaatcctgagaacctggccaccctggagcgctatgtagagacgcaggccaaggaaaatgcctatgatctggaagccaacctggctgtcctgaagctgtaccagttcaacccagccttctttcagaccacggtcaccgcccagatcctgctgaaggccctcaccaacttgccgcacacagacttcaccctgtgcaagtgcatgatcgaccaggcacatcaagaagaacggccaatccgacagattttgtacctcggggacctgctggagacctgccatttccaggccttctggaaagccctggatgaaaacatggacctcttggaaggtataactggctttgaagactctgtccgaaagtttatctgccatgttgtgggtatcacttaccagcacattgaccgctggctgctggccgagatgctcggggatctgtcggacagccagctaaaggtgtggatgagcaaatacggctggagtgccgacgagtcggggcagatcttcatctgtagccaagaagagagcattaaacccaagaacattgtggagaagattgactttgacagtgtgtccagcatcatggcctcctcccagtaacttcaggtgtttaataaagatgtgttgactcaga

SEQ ID NO: 104 - protein, 218 aa, Homo sapiens [sequence omitted]

SEQ ID NO: 105 - DNA, 529 bp, Homo sapiens
  CDS (33)..(488)
cgctctcctttcgttgcctgatcgccgccatcatgggtcgcatgcatgctcccgggaagggcctgtcccagtcggctttaccctatcgacgcagcgtccccacttggttgaagttgacatctgacgacgtgaaggagcagatttacaaactggccaagaagggccttactccttcacagatcggtgtaatcctgagagattcacatggtgttgcacaagtacgttttgtgacaggcaataaaattttaagaattcttaagtctaagggacttgctcctgatcttcctgaagatctctaccatttaattaagaaagcagttgctgttcgaaagcatcttgagaggaacagaaaggataaggatgctaaattccgtctgattctaatagagagccggattcaccgtttggctcgatattataagaccaagcgagtcctccctcccaattggaaatatgaatcatctacagcctctgccctggtcgcataaatttgtctgtgtactcaagcaataaaatgattgtttaacta

SEQ ID NO: 106 - protein, 151 aa, Homo sapiens [sequence omitted]

SEQ ID NO: 107 - DNA, 1198 bp, Homo sapiens
  CDS (213)..(1013)
cccacgcgtccgcggacgcgtgggcgcgcgggagctgggaggctgcgagatccctaccgcagtagccgcctctgccgccgcggacttcccgaacctcttcagccgcccggagccgctcccggagcccggccgtagaggctgcaatcgcagcgggagcccgcagcccgcgccccgagcccgccgccgcccttcgaggggccccaggccgcgccatggtgaaggtgacgttcaactccgctctggcccagaaggaggccaagaaggacgagcccaagagcggcgaggaggcgctcatcatcccccccgacgccgtcgcggtggactgcaaggacccagatgatgtggtaccagttggccaaagaagagcctggtgttggtgcatgtgctttggactagcatttatgcttgcaggtgttattctaggaggagcatacttgtacaaatattttgcacttcaaccagatgacgtgtactactgtggaataaagtacatcaaagatgatgtcatcttaaatgagccctctgcagatgccccagctgctctctaccagacaattgaagaaaatattaaaatctttgaagaagaagaagttgaatttatcagtgtgcctgtcccagagtttgcagatagtgatcctgccaacattgttcatgactttaacaagaaacttacagcctatttagatcttaacctggataagtgctatgtgatccctctgaacacttccattgttatgccacccagaaacctactggagttacttattaacatcaaggctggaacctatttgcctcagtcctatctgattcatgagcacatggttattactgatcgcattgaaaacattgatcacctgggtttctttatttatcgactgtgtcatgacaaggaaacttacaaactgcaacgcagagaaactattaaaggtattcagaaacgtgaagccagcaattgtttcgcaattcggcattttgaaaacaaatttgccgtggaaactttaatttgttcttgaacagtcaagaaaaacattattgaggaaaattaatatcacagcataaccccaccctttacattttgtgcagtgattattttttaaagtcttctttcatgtaagtagcaaacagggctttactatcttttcatctcattaattcaattaaaaccattaccttaaaaaaaaaaaaaaaaaaaaaaaaa

SEQ ID NO: 108 - protein, 266 aa, Homo sapiens
MVKVTFNSALAQKEAKKDEPKSGEEALIIPPDAVAVDCKDPDDVVPVGQRRAWCWCMCFGLAFMLAGVILGGAYLYKYFALQPDDVYYCGIKYIKDDVILNEPSADAPAALYQTIEENIKIFEEEEVEFISVPVPEFADSDPANIVHDFNKKLTAYLDLNLDKCYVIPLNTSIVMPPRNLLELLINIKAGTYLPQSYLIHEHMVITDRIENIDHLGFFIYRLCHDKETYKLQRRETIKGIQKREASNCFAIRHFENKFAVETLICS

SEQ ID NO: 109 - DNA, 444 bp, Homo sapiens
  CDS (61)..(288)
ctttagtcaggaaggacgttggtgttgaggttagcatacgtatcaaggacagtaactaccatggctcccgaagttttgccaaaacctcggatgcgtggccttctggccaggcgtctgcgaaatcatatggctgtagcattcgtgctatccctgggggttgcagctttgtataagtttcgtgtggctgatcaaagaaagaaggcatacgcagatttctacagaaactacgatgtcatgaaagattttgaggagatgaggaaggctggtatctttcagagtgtaaagtaatcttggaatataaagaatttcttcaggttgaattacctagaagtttgtcactgacttgtgttcctgaactatgacacatgaatatgtgggctaagaaatagttcctcttgataaataaacaattaacaaatactttgaaaaaaaaaaaaaaaaaaa

SEQ ID NO: 110 - protein, 75 aa, Homo sapiens
MAPEVLPKPRMRGLLARRLRNHMAVAFVLSLGVAALYKFRVADQRKKAYADFYRNYDVMKDFEEMRKAGIFQSVK

SEQ ID NO: 111 - DNA, 417 bp, Homo sapiens
  CDS (95)..(250)
gtggtctgatcttcctgcggctgaaccgcccggctgagccgacattgccggcgtcttggcgattcggcccgacgagctccgctttcgctacagcatggtggcctactggagacaggctggactcagctacatccgatactcccagatctgtgcaaaagcagtgagagatgcactgaagacagaattcaaagcaaatgctgagaagacttctggcagcaacgtaaaaattgtgaaagtaaagaaggaataatctaccctgactaaagcttgaaatgctacatttccaaggtgaagatgtgtgggcacatgttatggcagattgaaaaggatctcattccatgggaaaaaaaaaaatcctgtcttgttcataaattgacaatgtcaataaattgaaatatggttcactgttactcttga

SEQ ID NO: 112 - protein, 51 aa, Homo sapiens
MVAYWRQAGLSYIRYSQICAKAVRDALKTEFKANAEKTSGSNVKIVKVKKE

SEQ ID NO: 113 - DNA, 850 bp, Homo sapiens
  CDS (111)..(716)
ctgcaggcgtcgcgccaatcttcgctctgaggtgctgtctcaccggtgagacctggaagcgggcgagtctcgtgctgtgtcggacctgcagcccctggccttccgccaccatggagtacctcatcggtatccaaggccccgactatgttcttgtcgcctccgaccgggtggccgccagcaatattgtccagatgaaggacgatcatgacaagatgtttaagatgagtgaaaagatattactcctgtgtgttggagaggctggagacactgtacagtttgcagaatatattcagaaaaacgtgcaactttataagatgcgaaatggatatgaattgtctcccacggcagcagctaacttcacacgccgaaacctggctgactgtcttcggagtcggaccccatatcatgtgaacctcctcctggctggctatgatgagcatgaagggccagcgctgtattacatggactacctggcagccttggccaaggccccttttgcagcccacggctatggtgccttcctgactctcagtatcctcgaccgatactacacaccgactatctcacgtgagagggcagtggaactccttaggaaatgtctggaggagctccagaaacgcttcatcctgaatctgccaaccttcagtgttcgaatcattgacaaaaatggcatccatgacctggataacatttccttccccaaacagggctcctaacatcatgtcctccctcccacttgccagggaacttttttttgatgggctcctttatttttttctactcttttcaggcgcactcttgataaatggttaattcagaataaaggtgactatggatataattgaaaaaa

SEQ ID NO: 114 - protein, 201 aa, Homo sapiens
MEYLIGIQGPDYVLVASDRVAASNIVQMKDDHDKMFKMSEKILLLCVGEAGDTVQFAEYIQKNVQLYKMRNGYELSPTAAANFTRRNLADCLRSRTPYHVNLLLAGYDEHEGPALYYMDYLAALAKAPFAAHGYGAFLTLSILDRYYTPTISRERAVELLRKCLEELQKRFILNLPTFSVRIIDKNGIHDLDNISFPKQGS

SEQ ID NO: 115 - DNA, 1233 bp, Homo sapiens
  CDS (182)..(514)
ccccactggctgctctgaaaagccatctttgcattgttcctcatccgcctccttgctcgccgcagccgcctccgccgcgcgcctcctccgccgccgcggactccggcagctttatcgccagagtccctgaactctcgctttctttttaatcccctgcatcggatcaccggcgtgccccaccatgtcagacgcagccgtagacaccagctccgaaatcaccaccaaggacttaaaggagaagaaggaagttgtggaagaggcagaaaatggaagagacgcccctgctaacgggaatgctaatgaggaaaatggggagcaggaggctgacaatgaggtagacgaagaagaggaagaaggtggggaggaagaggaggaggaagaagaaggtgatggtgaggaggagggtggagatgaagatgaggaagctgagtcagctacgggcaagcgggcagctgaagatgatgaggatgacgatgtcgataccaagaagcagaagaccgacgaggatgactagacagcaaaaaaggaaaagttaaactaaaaaaaaaaaggccgccgtgacctattcaccctccacttcccgtctcagaatctaaacgtggtcaccttcgagtagagaggcccgcccgcccaccgtgggcagtgccacccgcagatgacacgcgctctccaccacccaacccaaaccatgagaatttgcaacaggggaggaaaaaagaaccaaaacttccaaggccctgctttttttcttaaaagtactttaaaaaggaaatttgtttgtattttttatttacattttatatttttgtacatattgttagggtcagccatttttaatgatctcggatgaccaaaccagccttcggagcgttctctgtcctacttctgactttacttgtggtgtgaccatgttcattataatctcaaaggagaaaaaaaaccttgtaaaaaaagcaaaaatgacaacagaaaaacaatcttattccgagcattccagtaacttttttgtgtatgtacttagctgtactataagtagttggtttgtatgagatggttaaaaaggccaaagataaaaggtttctttttttttccttttttgtctatgaagttgctgtttattttttttggcctgtttgatgtatgtgtgaaacaatgttgtccaacaataaacaggaattttattttgctgagttgttctaacagaaaaaaaaaaaaaaaaaaaaaaaaaaaaaa

SEQ ID NO: 116 - protein, 110 aa, Homo sapiens
MSDAAVDTSSEITTKDLKEKKEVVEEAENGRDAPANGNANEENGEQEADNEVDEEEEEGGEEEEEEEEGDGEEEGGDEDEEAESATGKRAAEDDEDDDVDTKKQKTDEDD

SEQ ID NO: 117 - DNA, 622 bp, Homo sapiens
cggacttgtcagtaggcttctgtctctttagagccgagaaaatagtaattaagtggcctagatataggaagggcaggaataagcacttactccccctgaccttccaatgatgaacaggagaagcagtgccaaatcctcaataattgcaagtcctgatgagaagtgatcttgtgagaatgcagcagaacacgataggtggatctggatagacgtcttgactctattcaaccggtacgtctcgtgatctggacgagtgccagattaaggtaacccacgattgttagacaaccgtcttcctgctgagccaaagtttgctcattacccctccactggggaagcagctgaggcccagggccttgctccctgggaaattctcttactctccgatctttcggtgctattggaccatgttactgtgccaaagtgtcttaatgcttgtcccatctatactcagcttggccttggaacccacataggagttggtgggggagggatgggtagatgggtattattcattgtatgttgatccaggtgtgtgtattatatatagagacccctcgccttattgtggtgtttgtccatccctcttccttaacaggattgaaatatatatgcttctgtt

SEQ ID NO: 118 - DNA, 515 bp, Homo sapiens
  CDS (47)..(484)
ctgcgcaggcgcggaccaaagcgatctcttctgaggatccggcaagatggcagaagtagagcagaagaagaagcggaccttccgcaagttcacctaccgcggcgtggacctcgaccagctgctggacatgtcctacgagcagctgatgcagctgtacagtgcgcgccagcggcggcggctgaaccggggcctgcggcggaagcagcactccctgctgaagcgcctgcgcaaggccaagaaggaggcgccgcccatggagaagccggaagtggtgaagacgcacctgcgggacatgatcatcctacccgagatggtgggcagcatggtgggcgtctacaacggcaagaccttcaaccaggtggagatcaagcccgagatgatcggccactacctgggcgagttctccatcacctacaagcccgtaaagcatggccggcccggcatcggggccacccactcctcccgcttcatccctctcaagtaatggctcagctaataaaggcgcacatgactcc

SEQ ID NO: 119 - protein, 145 aa, Homo sapiens [sequence omitted]

SEQ ID NO: 120 - DNA, 842 bp, Homo sapiens
  CDS (21)..(590)
gaattcggcacgagataaaaatggcttccaaaagagctctggtcatcctggctaaaggagcagaggaaatggagacggtcatccctgtagatgtcatgaggcgagctgggattaaggtcaccgttgcaggcctggctggaaaagacccagtacagtgtagccgtgatgtggtcatttgtcctgatgccagccttgaagatgcaaaaaaagagggaccatatgatgtggtggttctaccaggaggtaatctgggcgcacagaatttatctgagtctgctgctgtgaaggagatactgaaggagcaggaaaaccggaagggcctgatagccgccatctgtgcaggtcctactgctctgttggctcatgaaataggttgtggaagtaaagttacaacacaccctcttgctaaagacaaaatgatgaatggaggtcattacacctactctgagaatcgtgtggaaaaagacggcctgattcttacaagccgggggcctgggaccagcttcgagtttgcgcttgcaattgttgaagccctgaatggcaaggaggtggcggctcaagtgaaggctccacttgttcttaaagactagagcagcgaactgcgacgatcacttagagaaacaggccgttaggaatccattctcactgtgttcgctctaaacaaaacagtggtaggttaatgtgttcagaagtcgctgtccttactacttttgcggaagtatggaagtcacaactacacagagatttctcagcctacaaattgtgtctatacatttctaagccttgtttgcagaataaacagggcatttagcaaactaaaaaaaaaaaaaaaaaaactcgag

SEQ ID NO: 121 - protein, 189 aa, Homo sapiens
MASKRALVILAKGAEEMETVIPVDVMRRAGIKVTVAGLAGKDPVQCSRDVVICPDASLEDAKKEGPYDVVVLPGGNLGAQNLSESAAVKEILKEQENRKGLIAAICAGPTALLAHEIGCGSKVTTHPLAKDKMMNGGHYTYSENRVEKDGLILTSRGPGTSFEFALAIVEALNGKEVAAQVKAPLVLKD

SEQ ID NO: 122 - DNA, 636 bp, Homo sapiens
tttttttttttttttttttttccatcaaaagtttctaattttattctgagaaaagataacaccaagaaaacaattttaactacagaaacaatggttagcgtaaaaaattaataatcaaaaagataaaccatgttataagtacttaacaaacttataaactatttcttccataacattctccatattttaagttcatacatgttgatatgatcagatttacaatttttcagaaaagacgggggaaaaggtgtgattatcgtcagctagatgtgctcactgcatgctccattatttatctgcaaggcctgggtgactggaagtgcagttgacaggcattttaataaactggacagccatttgttcttcaggacaaggcgtgttttccccaggagcaatcagaagaaaacaggaagcagctcagcactctgcactgcaacaggccaccttaatagctaaccagcatcactcaactgctacgcagccgggcctggtgcacaaaaacacaaaggagattagacctgtgtttgctaaaccccagtcctttcacatgaaaatcttatacaaattgggtccaatacctttagccttggaggtaataaatttccatatgattacccacttttgaagttttgagag

SEQ ID NO: 123 - DNA, 574 bp, Homo sapiens
  CDS (106)..(507)
cagtgacgtgacacgcagcccacggtctgtactgacgcgccctcgcttcttcctctttctcgactccatcttcgcggtagctgggaccgccgttcagtcgccaatatgcagctctttgtccgcgcccaggagctacacaccttcgaggtgaccggccaggaaacggtcgcccagatcaaggctcatgtagcctcactggagggcattgccccggaagatcaagtcgtgctcctggcaggcgcgcccctggaggatgaggccactctgggccagtgcggggtggaggccctgactaccctggaagtagcaggccgcatgcttggaggtaaagtccatggttccctggcccgtgctggaaaagtgagaggtcagactcctaaggtggccaaacaggagaagaagaagaagaagacaggtcgggctaagcggcggatgcagtacaaccggcgctttgtcaacgttgtgcccacctttggcaagaagaagggccccaatgccaactcttaagtcttttgtaattctggctttctctaataaaaaagccacttagttcagtcaaaaaaaaaaaaaaaaa

SEQ ID NO: 124 - protein, 133 aa, Homo sapiens
MQLFVRAQELHTFEVTGQETVAQIKAHVASLEGIAPEDQVVLLAGAPLEDEATLGQCGVEALTTLEVAGRMLGGKVHGSLARAGKVRGQTPKVAKQEKKKKKTGRAKRRMQYNRRFVNVVPTFGKKKGPNANS

SEQ ID NO: 125 - DNA, 947 bp, Homo sapiens
  CDS (66)..(440)
ctccccccgagcgccgctccggctgcaccgcgctcgctccgagtttcaggctcgtgctaagctagcgccgtcgtcgtctcccttcagtcgccatcatgattatctaccgggacctcatcagccacgatgagatgttctccgacatctacaagatccgggagatcgcggacgggttgtgcctggaggtggaggggaagatggtcagtaggacagaaggtaacaatgatgactcgctcattggtggaaatgcctccgctgaaggccccgagggcgaaggtaccgaaagcacagtaatcactggtgtcgatattgtcatgaaccatcacctgcaggaaacaagtttcgcaaaagaagacgacagaagggcagcaaaatcaggaaaagggtgcatgaacaaaatgaaaatatcaacaaagagaaactgtaaaaacgtatcataatacaaattaaaaagctgaagaatacactgaaatgaaaattcactgtagagaatcaagagcagaccggatcaaaccgaaaaataagtccacaagtttgaggacaggtcatttgaaattatcaagccagaggagcaaaaagagaatgaaaaaaagctaagaaagtctaaaggacttttgggacaccaacaggcagaccaatatacacataagggaagtaaaggaagacagagagaaagataaataattgctgaaaatgtctgaaactggaagaagaaaatggagatgcaaattcaagaagctcaaagacctccaactattgttaacccaaaaacatctacactgagatacattataaccaagctgcctgaatcacagtaaataatcttgaaagcagtaagagaaaagcaactcataacaacacacaagggaactcccataagataacacgcaagatatctcagcagaaatcttgtaggccttgaaagagtgagataatatattatcaaa

SEQ ID NO: 126 - protein, 124 aa, Homo sapiens
RRRRLPSVAIMIIYRDLISHDEMFSDIYKIREIADGLCLEVEGKMVSRTEGNNDDSLIGGNASAEGPEGEGTESTVITGVDIVMNHHLQETSFAKEDDRRAAKSGKGCMNKMKISTKRNCKNVS

SEQ ID NO: 127 - DNA, 611 bp, Homo sapiens
ggcagtgtcaagcctgaaaccaagcaataccgtcatgtttcagccaagcccagagccctaagattacaaacaactatggccggaacctcctcagctctccctctgcagagttccctaccctaagagaatgttaccacctgaacagtcctcggtgaatctgagaggagaggatggggtaaggcagaagcaccagctgtactactagaagggagcttttggtggtagatcccctggtgtctccaacctgactaggtggacagagctcaaagaggccctcttaccgctagcgaggtgataggacatctggcttgccacaaaggtctgttcgaccagacatatcctagctaagggatgtccaaacatcagaatgtgaggccaaccttctatcagagttaaacttttgacaagggaacaaatctcaaactgatccatcagtcatgtagctagctgtagagcttgcaacttaatagcagcagctgcccaatgccatgtgaagtaacaaactggtttttggtttttttttccccttcagttttaatgttatgtgtaatgtatttaaacccttatttaaataaaacttgttttcagaaataaaaaaaaaaaaaaaaaar

SEQ ID NO: 128 - DNA, 384 bp, Homo sapiens
  CDS (18)..(227)
gccgccgcgccgccatcatggacaccagccgtgtgcagcctatcaagctggccagggtcaccaaggtcctgggcaggaccggttctcagggacagtgcacgcaggtgcgcgtggaattcatggacgacacgagccgatccatcatccgcaatgtaaaaggccccgtgcgcgagggcgacgtgctcacccttttggagtcagagcgagaagcccggaggttgcgctgagcttggctgctcgctgggtcttggatgtcgggttcgaccacttggccgatgggaatggtctgtcacaatctgctccttttttttgtccgccacacgtaactgagatgctcctttaaataaagcgtttgtgtttcaagttaaaaaaaaaaaaaaaaaa

SEQ ID NO: 129 - protein, 69 aa, Homo sapiens [sequence omitted]

SEQ ID NO: 130 - DNA, 1148 bp, Homo sapiens
cttttacatatttctaaatagatagaactaaatgatcagagaatttcttctgtaaaaattggccaaattttatcaaaaatctaacatacgatacaatccaaattataaaaagactacttgggatcataatattccaaatgtatgacagttataactccatcttaacaagtgtgaaaagtacttgctctcatgttgctttggtccaaaagagtagagctaactcagtaacaggaaactaagtacccaatcttttgccaaaattaatttagattgtgactggcagcagaaatatccataatgaacagctctactataacaaagaataattaaagaatacttttcgtgaacatatcacagtatcaaatacatttttataagagaaaaatatgaaggaaatgataaaatagctatcacaaacaaaaagaagcatttcccccataaggtgaattagagggttgatgatgctaatatgaaaggaagttgagtactgtatttatttcttattttatacaactcttactctttacaaaaatggttatagtcatgcccataaaagtgtaacccatggcatttgaaagcaaacactctttgtaattatttaaaagggcctttttaaaaattataatacaaaggtctgtgctctataagcagtcctccactgtgcattgtaacaataaggcttacttttaatacaaagactaagcgtttgggagttatgacccactggatttacaaacatcaatttataaattgctttatgcaatctatgtgctatagggatactccacttcatcaagggttctccacaagcttggagatacttcgaagaattctctcattacatgaaatctggattccttcagaatcacctggactttacggaacgagggagcaaacaacggcacgtaataactcggacacgtaacaaacgatcaagaaggagaccacagcacgatgccaagcacaataggcgagaataccggatcaatagagcccaatggcgagagtcaaagcagcgtcacaatgagagcactccaggtaggagtggtgcattagacaagtgaggataccaggagaagaagagagacgatagagacataagagaggagccgaaacaagacacccaccacagaacaaagaagaagaca

SEQ ID NO: 131 - DNA, 1000 bp, Homo sapiens
gtgtgctcgtttggtgcggacctggtacctcttttgtgaagcggcagctgaggagactccggcgctcgccatggccgacgaaaagcccaaggaaggagtcaagactgagaacaacgatcatattaatttgaaggtggcggggcaggatggttctgtggtgcagtttaagattaagaggcatacaccacttagtaaactaatgaaagcctattgtgaacgacagggattgtcaatgaggcagatcagattccgatttgacgggcaaccaatcaatgaaacagacacacctgcacagttggaaatggaggatgaagatacaattgatgtgttccaacagcagacgggaggtgtctactgaaaagggaacctgcttctttactccagaactctgttctttaaagaccaagattacattctcaattagaaaactgcaatttggttccaccacatcctgactactaccgtatagttttctctattctttcatttcccccttccccattcctttattgtacataaagtaactggtatatgtgcacaagcatattgcatttttttttttttaactaaacagccaatggtatgttttgattgacatcaagtggagacgggatggggaaaaatactgattctgtgaaaataccccctttctccattagtggcatgctcattcagctcttatctttatattccagtaagttattttgctctcactgttttaacaaaaaaaaaaaaacaacaacataaaaatccttgcataccttgttcaattggagaattttaatgtttttcatttatcattgtaaaaccaaggacaattttataacttttttgtacgtagctgttacatgtagggcaatctgtctttaagtagggataaattactctaaaacaaaaaagaatcctagatagttttcccttcaagtcaagcgtcttgttgtttaaataaacttcttgtttaaaatgaaaaaaaaaaaaaaaaaaaaaaaaaaaaaaaaaa

SEQ ID NO: 132 - DNA, 1744 bp, Homo sapiens
  CDS (29)..(1156)
ccgccgtcgcgtttctctgccggtcgcaatggaagaagagatcgccgcgctggtcattgacaatggctccggcatgtgcaaagctggttttgctggggacgacgctccccgagccgtgtttccttccatcgtcgggcgccccagacaccagggcgtcatggtgggcatgggccagaaggactcctacgtgggcgacgaggcccagagcaagcgtggcatcctgaccctgaagtaccccattgagcatggcatcgtcaccaactgggacgacatggagaagatctggcaccacaccttctacaacgagctgcgcgtggccccggaggagcacccagtgctgctgaccgaggcccccctgaaccccaaggccaacagagagaagatgactcagattatgtttgagaccttcaacaccccggccatgtacgtggccatccaggccgtgctgtccctctacgcctctgggcgcaccactggcattgtcatggactctggagacggggtcacccacacggtgcccatctacgagggctacgccctcccccacgccatcctgcgtctggacctggctggccgggacctgaccgactacctcatgaagatcctcactgagcgaggctacagcttcaccaccacggccgagcgggaaatcgtgcgcgacatcaaggagaagctgtgctacgtcgccctggacttcgagcaggagatggccaccgccgcatcctcctcttctctggagaagagctacgagctgcccgatggccaggtcatcaccattggcaatgagcggttccggtgtccggaggcgctgttccagccttccttcctgggtatggaatcttgcggcatccacgagaccaccttcaactccatcatgaagtgtgacgtggacatccgcaaagacctgtacgccaacacggtgctgtcgggcggcaccaccatgtacccgggcattgccgacaggatgcagaaggagatcaccgccctggcgcccagcaccatgaagatcaagatcatcgcacccccagagcgcaagtactcggtgtggatcggtggctccatcctggcctcactgtccaccttccagcagatgtggattagcaagcaggagtacgacgagtcgggcccctccatcgtccaccgcaaatgcttctaaacggactcagcagatgcgtagcatttgctgcatgggttaattgagaatagaaatttgcccctggcaaatgcacacacctcatgctagcctcacgaaactggaataagccttcgaaaagaaattgtccttgaagcttgtatctgatatcagcactggattgtagaacttgttgctgattttgaccttgtattgaagttaactgttccccttggtattaacgtgtcagggctgagtgttctgggatttctctagaggctggcaagaaccagttgttttgtcttgcgggtctgtcagggttggaaagtccaagccgtaggacccagtttcctttcttagctgatgtctttggccagaacaccgtgggctgttacttgctttgagttggaagcggtttgcatttacgcctgtaaatgtattcattcttaatttatgtaaggttttttttgtacgcaattctcgattctttgaagagatgacaacaaattttggttttctactgttatgtgagaacattaggccccagcaacacgtcattgtgtaaggaaaaataaaagtgctgccgtaaccaaaaaaaaaaaaaaaaaaaaa

SEQ ID NO: 133 - protein, 375 aa, Homo sapiens
MEEEIAALVIDNGSGMCKAGFAGDDAPRAVFPSIVGRPRHQGVMVGMGQKDSYVGDEAQSKRGILTLKYPIEHGIVTNWDDMEKIWHHTFYNELRVAPEEHPVLLTEAPLNPKANREKMTQIMFETFNTPAMYVAIQAVLSLYASGRTTGIVMDSGDGVTHTVPIYEGYALPHAILRLDLAGRDLTDYLMKILTERGYSFTTTAEREIVRDIKEKLCYVALDFEQEMATAASSSSLEKSYELPDGQVITIGNERFRCPEALFQPSFLGMESCGIHETTFNSIMKCDVDIRKDLYANTVLSGGTTMYPGIADRMQKEITALAPSTMKIKIIAPPERKYSVWIGGSILASLSTFQQMWISKQEYDESGPSIVHRKCF

SEQ ID NO: 134 - DNA, 6040 bp, Homo sapiens
  CDS (1)..(3195)
atgaatcatgattttcaagctcttgcattagaatctcggggaatgggagagcttttgcctaccaaaaagttttgggaacctgatgattcaacaaaagatggacaaaaaggcatatttcttggggatgatgaatggagagagactgcatggggagcttctcaccattcaatgtcccagcctattatggtacagagaagatctggacagggttttcatggaaacagtgaagtaaatgcaatactgtctccgcgatcagaaagtggaggccttggtgtgagcatggtagaatatgtattaagttcttctcctgctgataaattggattctcgatttaggaagggaaattttggcactagagatgctgaaacagatggacctgagaaaggagatcaaaaaggcaaggcttctccatttgaggaggaccaaaacagagaccttaaacaaggagatgatgatgattctaaaataaatggcagaggtttgccaaatggaatggatgccgattgcaaagattttaatcgtactcctggaagtcgtcaagcctctccaactgaagtagttgagcgcttgggccccaatactaatccctcagaaggactggggcctcttcctaatcctacagctaataaaccacttgttgaagaattttcaaatcctgaaactcagaatctggatgccatggaacaagttggtctggaatccttacagtttgactatcctggtaatcaggtaccaatggactcttcaggagctactgtaggcctttttgactacaattcccagcagcagctctttcagaggactaatgcactaacagttcaacagttaactgcagctcaacagcagcaatatgcattagcagcagctcagcagccacatatagctggtgtattctcagcaggccttgctccagctgcatttgtgccaaatccatacattattagtgctgctcctccagggaccgatccgtatactgcagcaggattggctgcagcagctacattagcaggtccagcagtggttccacctcagtattacggcgttccatggggggtgtatccagccaacttatttcagcagcaagctgcagctgcggcaaataacacagccagtcagcaagcagcatcacaagctcagcctggacagcaacaggttctccgtgctggagcaggtcagcgtcctcttactcccaatcagggtcagcaagggcagcaagcagaatcacttgcggcagctgcagcagcaaatccaacattggcttttggtcagggtcttgctactggcatgccaggctatcaagtactagctccaactgcctattatgatcagactggtgccttagtggttggccctggagcaaggactggccttggagctccagttcggttaatggctccaacacctgttttaattagttcagcagcagcacaagctgcagcagcagcagcagctggaggaactgcaagtagccttacaggcagcacaaatggtctgtttcggccaattggcactcagccaccacagcagcagcaacagcagccaagcactaatctgcaatctaattcattttatggaagcagttctttgactaatagctcccagagtagttctttattttctcatggacctggtcaacctggaagtacatctcttggctttggaagtggtaactctttgggtgctgctataggctcagccctcagtggatttggttcatcagttggcagttctgcaagtagtagtgccacaaggagagagtctctatctactagctctgacttgtacaaaagatctagtagcagcctagcacccatagggcaaccattttacaatagtctgggattttcctcctctccaagtccaataggcatgcctctgccaagccaaactccaggacattcacttacgccaccgccatcactttcatcacatggatcctcatccagtttgcatttaggaggactgacaaatggtagtggtcgatatatctctgcagcacctggagcagaagcaaaatatcgaagtgcttcaagcacttccagtctatttagctccagcagccagctctttcctccttcccggcttcggtataataggtctgatattatgccttctggccgcagtagattattggaagatttcagaaacaaccgcttcccaaaccttcagcttagagacttgattggacatatagttgagttttctcaagaccagcatggttctagattcatacagcaaaaactagagagagctactccagctgagcgacagatggtatttaatgaaattctgcaagcagcctatcaattaatgactgatgtttttggcaactatgttatacagaagttttttgagtttgggagtctggatcaaaaattagccctggctactcgtattcgtggtcatgttctacccttagccttgcagatgtatggctgccgcgttattcagaaagcattagaatctatttcttctgaccagcagagtgaaatggtaaaggagctggatggtcatgtgctcaaatgtgtgaaagatcagaatggaaaccatgttgtacaaaaatgtatcgaatgtgttcagccacagtcactacagttcatcattgatgctttcaagggacaagtatttgtgctttcaactcatccttatggctgcagagtaattcagcgcatcctagagcattgcactgcagaacagaccttacctatcttagaagaactccaccaacatacagagcagttggtacaggatcagtatggcaattatgttattcagcatgtactggaacacggtcgacctgaagacaagagcaaaattgtttccgaaatcaggggaaaggttttagccctgagtcaacacaaatttgccagcaatgtagtagaaaagtgtgttactcatgcctcccgtgctgagagagctttactgattgacgaggtttgctgccagaatgatggtcctcacagtgccttatacaccatgatgaaggaccagtatgccaattacgtggttcaaaagatgattgatatggctgaacctgctcagagaaagataatcatgcacaagattcgacctcacattactactttgcgcaaatacacatacgggaagcatatactggccaagttggaaaagtattatttgaagaatagcccggacctaggacctattggaggaccaccaaatggaatgctgtaaattacaggagcaagagaaagaagataatttaaccatgtgaaaagaatttttttgtgcgtgaattatcaaaacacaactcaactatgaatcttcaatttttttttaaagcaaaactatttattgactttattcatccatttgtaaattttttaaggttcttgtgtatatttggggggtgggggatgaattataaattatattcagccctgagtggagacctatcagattggattgctggcaaagcacagaatgcctgtatatgatgtaactgtatcaaaaataaaaagctgtcacatattttgtaaatttttaccttgtaaagtcacaaaaatagtttttaaaggaaaaagtacagtattcttttaataaactggctcacagtctggtaggtctacaaccccatagcacaacaggtttatagagatgtatatagaattatagtccttatttttttcctttgcgtgaaaccttttataacagattaacaatcaactgcataaatattattaatattttaaaaagagttaagttgtattttgataattcacaaactatcatgcaaataacgagtaagtagacaagaataaagtggtttgagatgaaaagaacctaacattatttacagtagatgtggttttaatacaattactgccctaaaatgtctctggcaatgtacagaaatattgtatatacttacatatgtaattgttgtaagagttaaatacaaaatcatggtgacacttccaattaagtgcactaaatgaaaagttaagtcacttattaacttttcagtttggtttgcaatgagaaagagtggaaatttgtattttgttttgcttatagaattacagacatgttgaggaagtgttgagctttattttgctttttcatagaggcagaaagtaggaaccagatagagatgaaaaggggccactgaaaagtgaatttgatagctcagcatttaagcatgattacatattcagatagctctttttgctttctataaatatatgcattgtgtgtgtagtaatagatgtaagtttacactttgaaaggaaatcttgtttcaatgtttattataaaagccttgctaatttagtagtgatgctttccttggttgtacaggtgtacatttgtaaaccttcatgctgtaaatggaatttgttttatctctttgggatacatttgcattttagtgtacatttacgtccctgccctctttgacctggcaatatagtgttgtataatgtaaatttatttctccaaatcgagagtgattttttaaaaattttttatctttatatggtttcagaagtatgaaccagctttctttttattattgtgagatcattttgttttataacatagttgttgactgttaatatggacctgctagaatttggatcactttcaattgaagtcagggtattgtgcataatagaaagtattggactgagatatttggttaccatggaggccaatgcttttttcatcttattaaatgtgatgtgacttttttctttgtacagaagagtactgtatttttgaatagcctactcccaagtaagagcaaatctgtatgataacattttttcctctggacataagacataacagtaacacgatgtacatttacaagcggccttatgtacatttcccaacaatctttttaaggcaaaattgtgaccatatgtgtataattaaaatcgtttttaatcctttgcctatgaaaatattttggaaaaaaacttgctgtgtatattcagtttctgaaagataaagaaagtgctttgtattttgttgaagtcagtattttgtataaacatttatgttgacccacttatgttcagtgctgaaaactaaaatgaacatgctattctgtcagctgaatatggaagagatctttttttactagagatctgcagaagaaacgcaatcttctgagcacaatatggaatctaaaggttttatcacttagttgttcatattatgaacctaaaaataatggcataaagtttggggatgccaggcatactttttcatgtttggtgttgagttattttacttttctaacccaacattccttggtgagaccattaaatccaaacacttgtcaccgttccttctcatagtcactctgggtcatcagcatgtcccagtcactgcagcaacgccttgtgtttgtttcatttttttaaaacccacacaaagccgctgtctcactttttcctactttaccaacctcagagtatttcggcccgtatcgaacttttgttctcagtatcagcccatggtttcaggatcaaagctgtcatgttggagattggtaatggctttcctgtctttgtacagttgaattcctagtcttccttcatccttgccctctgttggcacaggcattatctctgcaattttagaaaatgacaagtagagaatactacattgagaaactaaaccctcttcttggggtcctgatactcattcccatttgtcccagtgctgacaacccaatcttcccaatactttcaggcctgctctacaaaagtacctgttcttgtagaaattttacagtctgccattttgggtgcccaccccaatttttaccttttagtaagttggcatgaaattttggtaaaatctgaaaatcacatttcagaataaaacaattgggcaaaactacctaggctttactcttgagtgtctccttttgatagggattgtttctggaccagtttgtctaagtcctggctcttattggttcatatgaaataatgttaacttcacttctttgtatattatgtataaattagaaaatgaaaaatgtgtgaataacattgtatgaaat

SEQ ID NO: 135 - protein, 1064 aa, Homo sapiens
MNHDFQALALESRGMGELLPTKKFWEPDDSTKDGQKGIFLGDDEWRETAWGASHHSMSQPIMVQRRSGQGFHGNSEVNAILSPRSESGGLGVSMVEYVLSSSPADKLDSRFRKGNFGTRDAETDGPEKGDQKGKASPFEEDQNRDLKQGDDDDSKINGRGLPNGMDADCKDFNRTPGSRQASPTEVVERLGPNTNPSEGLGPLPNPTANKPLVEEFSNPETQNLDAMEQVGLESLQFDYPGNQVPMDSSGATVGLFDYNSQQQLFQRTNALTVQQLTAAQQQQYALAAAQQPHIAGVFSAGLAPAAFVPNPYIISAAPPGTDPYTAAGLAAAATLAGPAVVPPQYYGVPWGVYPANLFQQQAAAAANNTASQQAASQAQPGQQQVLRAGAGQRPLTPNQGQQGQQAESLAAAAAANPTLAFGQGLATGMPGYQVLAPTAYYDQTGALVVGPGARTGLGAPVRLMAPTPVLISSAAAQAAAAAAAGGTASSLTGSTNGLFRPIGTQPPQQQQQQPSTNLQSNSFYGSSSLTNSSQSSSLFSHGPGQPGSTSLGFGSGNSLGAAIGSALSGFGSSVGSSASSSATRRESLSTSSDLYKRSSSSLAPIGQPFYNSLGFSSSPSPIGMPLPSQTPGHSLTPPPSLSSHGSSSSLHLGGLTNGSGRYISAAPGAEAKYRSASSTSSLFSSSSQLFPPSRLRYNRSDIMPSGRSRLLEDFRNNRFPNLQLRDLIGHIVEFSQDQHGSRFIQQKLERATPAERQMVFNEILQAAYQLMTDVFGNYVIQKFFEFGSLDQKLALATRIRGHVLPLALQMYGCRVIQKALESISSDQQSEMVKELDGHVLKCVKDQNGNHVVQKCIECVQPQSLQFIIDAFKGQVFVLSTHPYGCRVIQRILEHCTAEQTLPILEELHQHTEQLVQDQYGNYVIQHVLEHGRPEDKSKIVSEIRGKVLALSQHKFASNVVEKCVTHASRAERALLIDEVCCQNDGPHSALYTMMKDQYANYVVQKMIDMAEPAQRKIIMHKIRPHITTLRKYTYGKHILAKLEKYYLKNSPDLGPIGGPPNGML

SEQ ID NO: 136 - DNA, 1130 bp, Homo sapiens
cgtccgcccacgcgtccggccgccgccgcgccgccgtcgcgtctccaacgccagcgccgcctctcgctcgccgagctccagccgaaggagaaggggggtaagtaaggaggtctctgtaccatggctcgtacaaagcagactgcccgcaaatcgaccggtggtaaagcacccaggaagcaactggctacaaaagccgctcgcaagagtgcgccctctactggaggggtgaagaaacctcatcgttacaggcctggtactgtggcgctccgtgaaattagacgttatcagaagtccactgaacttctgattcgcaaacttcccttccagcgtctggtgcgagaaattgctcaggactttaaaacagatctgcgcttccagagcgcagctatcggtgctttgcaggaggcaagtgaggcctatctggttggcctttttgaagacaccaacctgtgtgctatccatgccaaacgtgtaacaattatgccaaaagacatccagctagcacgccgcatacgtggagaacgtgcttaagaatccactatgatgggaaacatttcattctcaaagcacaaacagacttactcttctccggtcacggcagttctgaaccgtagatattcttccccatggggttccacagcgtaccttaaggtatatgattgccacgttcacaccactgtgggccagcaatcagcgtatggccagctatccaattcccattcggcgcgtgacccttcaaattaactggctgagaacgcttagcataatgccgctcaaatgttccggtaccaagtccggagctaccgttataagacttcatcacaaaccgtgtaaattctccgggcgacacgccgacttaggggcgttcctaaaccccggaagatctaatagagcggcccccacacgcggtaagacgccagtattataaacagcggatcgccacccgagtatatcaccaccgaccgcccacggcagctctacattctgggctatcagacgccgtctcggagagaaaactctataaaacaaaggcgcgctaacccgtaccccaactcatgagcgcagacgatgacggccccgcagactcgcatcacaaacttcctttagttattcgtcagctacagtcgaca

SEQ ID NO: 137 - DNA, 580 bp, Homo sapiens; identical to SEQ ID NO: 72
  CDS (60)..(371)

SEQ ID NO: 138 - protein, 103 aa, Homo sapiens; identical to SEQ ID NO: 73

SEQ ID NO: 139 - DNA, 1769 bp, Homo sapiens
  CDS (105)..(1067)
gagagggcgaaggtaggctggcagatacgttcgtcagcttgctcctttctgcccgtggacgccgccgaagaagcatcgttaaagtctctcttcaccctgccgtcatgtctaagtcagagtctcctaaagagcccgaacagctgaggaagctcttcattggagggttgagctttgaaacaactgatgagagcctgaggagccattttgagcaatggggaacgctcacggactgtgtggtaatgagagatccaaacaccaagcgctctaggggctttgggtttgtcacatatgccactgtggaggaggtggatgcagctatgaatgcaaggccacacaaggtggatggaagagttgtggaaccaaagagagctgtctccagagaagattctcaaagaccaggtgcccacttaactgtgaaaaagatatttgttggtggcattaaagaagacactgaagaacatcacctaagagattattttgaacagtatggaaaaattgaagtgattgaaatcatgactgaccgaggcagtggcaagaaaaggggctttgcctttgtaacctttgacgaccatgactccgtggataagattgtcattcagaaataccatactgtgaatggccacaactgtgaagttagaaaagccctgtcaaagcaagagatggctagtgcttcatccagccaaagaggtcgaagtggttctggaaactttggtggtggtcgtggaggtggtttcggtgggaatgacaacttcggtcgtggaggaaacttcagtggtcgtggtggctttggtggcagccgtggtggtggtggatatggtggcagtggggatggctataatggatttggcaatgatggaagcaattttggaggtggtggaagctacaatgattttgggaattacaacaatcagtcttcaaattttggacccatgaagggaggaaattttggaggcagaagctctggcccctatggcggtggaggccaatactttgcaaaaccacgaaaccaaggtggctatggcggttccagcagcagcagtagctatggcagtggcagaagattttaattaggaaacaaagcttagcaggagaggagagccagagaagtgacagggaagctacaggttacaacagatttgtgaactcagccaagcacagtggtggcagggcctagctgctacaaagaagacatgttttagacaaatactcatgtgtatgggcaaaaaactcgaggactgtatttgtgactaattgtataacaggttattttagtttctgttctgtggaaagtgtaaagcattccaacaaagggttttaatgtagatttttttttttgcaccccatgctgttgattgctaaatgtaacagtctgatcgtgacgctgaataaatgtcttttttttaatgtgctgtgtaaagttagtctactcttaagccatcttggtaaatttccccaacagtgtgaagttagaattccttcagggtgatgccaggttctatttggaatttatatacaacctgcttgggtggagaagccattgtcttcggaaaccttggtgtagttgaactgatagttactgttgtgacctgaagttcaccattaaaagggattacccaagcaaaatcatggaatggttataaaagtgattgttggcacatcctatgcaatatatctaaattgaataatggtaccagataaaattatagatgggaatgaagcttgtgtatccattatcatgtgtaatcaataaacgatttaattctcttgaa

SEQ ID NO: 140 - protein, 320 aa, Homo sapiens
MSKSESPKEPEQLRKLFIGGLSFETTDESLRSHFEQWGTLTDCVVMRDPNTKRSRGFGFVTYATVEEVDAAMNARPHKVDGRVVEPKRAVSREDSQRPGAHLTVKKIFVGGIKEDTEEHHLRDYFEQYGKIEVIEIMTDRGSGKKRGFAFVTFDDHDSVDKIVIQKYHTVNGHNCEVRKALSKQEMASASSSQRGRSGSGNFGGGRGGGFGGNDNFGRGGNFSGRGGFGGSRGGGGYGGSGDGYNGFGNDGSNFGGGGSYNDFGNYNNQSSNFGPMKGGNFGGRSSGPYGGGGQYFAKPRNQGGYGGSSSSSSYGSGRRF

SEQ ID NO: 141 - DNA, 1010 bp, Homo sapiens
  misc_feature (15)..(15): n is a, c, g, or t
  misc_feature (17)..(17): n is a, c, g, or t
  misc_feature (25)..(25): n is a, c, g, or t
  misc_feature (26)..(26): n is a, c, g, or t
  misc_feature (28)..(28): n is a, c, g, or t
  misc_feature (82)..(82): n is a, c, g, or t
gaggattcagcdkcnbnycccttgnnynccctcgcttcccgacgttccgtkccvccctgcccgccttctcccgccaccgcynccgccgccttccgcagccgtttccaccgaggaaaaggaatcgtatcgtatgtmcgctatccagaacctccactctttcgacccctttgctgatgcaagtaagggtgatgacctgcttcctgctggcactgaggattatatccatataagaattcaacagagaaacggcaggaagacccttactactgtccaagggatcgctgatgattacgataaaaagaaactagtgaaggcgtttaagaaaaagtttgcctgcaatggtactgtaattgagcatccggaatatggagaagtaattcagctacagggtgaccaacgcaagaacatatgccagttcctcgtagagattggactggctaaggacgatcagctgaaggttcatgggttttaagtgcttgtggctcactgaagcttaagtgaggatttccttgcaatgagtagaatttcccttctctcccttgtcacaggtttaaaaacctcacagcttgtataatgtaaccatttggggtccgcttttaacttggactagtgtaactccttcatgcaataaactgaaaagagccatgctgtctagtcttgaagtccctcatttaaacagaggtcaagcaataggcgcctggcagtgtcaagcctgaaaccaagcaataccgtcatgtttcagccaagcccagagccctaagattacaaacaactatggccggaacctcctcagctctccctctgcagagttccctaccctaagagaatgttaccacctgaacagtcctcggtgaatctgagaggagaggatggggtaaggcagaagcaccagctgtwctactagaagggagcttttggtggtagatcccttggtgtctccacctgactaggtggacagagctcaaagaggcctcttaccgctagcgaggtgataggacawctggcttgca

SEQ ID NO: 142 - DNA, 1075 bp, Homo sapiens
acttttatttttccttacacaatgacgtgttgchggggcctaatgttctcacataacagtagaaaaccaaaatttgttgtcatctcttcaaagaatcgagaattgcgtacaaaaaaaaccttacataaattaagaatgaatacatttacaggcgtaaatgcaaaccgcttccaactcaaagcaagtaacagcccacggtgttctggccaaagacatcagctaagaaaggaaactgggtcctacggcttggactttccaaccctgacagacccgcaagacaaaacaactggttcttgccagcctctagagaaatcccagaacactcagccctgacacgttaataccctgcacagatcagaggctgctggccacacagactcaccaagccacagacttgtcttccacaagcacgttcttaccttagccacgaagkaccaagccacacgtactaaaggttgaactcaaagatatgtacagggtattaaacaaataccaaggggaacagttaacttcaatacaaggtcaaaatcagcaacaagttctacaatccagtgctgatatcagatacaagcttcaaggacaatttcttttcgaaggcttattccagtttcgtgaggctagcatgaggtgtgtgcatttgccaggggcaaatttctattctcaattaacccatgcagcaaatgctacgcatctgctgagtccgtttagaagcatttgcggtggacgatggaggggcccgactcgtcgtactcctgcttgctaatccacatctgctggaaggtggacagtgaggccaggatggagccaccgatccacaccgagtacttgcgctctgggggtgcgatgatcttgatcttcatggtgctgggcgccagggcggtgatctccttctgcatcctgtcggcaatgcccggatacatggtggtgccgcccgacagcaccgtgttggcgtacaggtctttgcggatgtccacgtcacacttcatgatggagttgaaggtggtctcgtggatgcggcagattcatacccaggaaggaaggctggacasgccttccggcacggaacgctcattgc

SEQ ID NO: 143 - DNA, 802 bp, Homo sapiens
  CDS (165)..(674)
cgacgttcgcagcgctacccttttccgctccacggtgacctccgtgcggccgggtgcgggcggagtcttcctcgatcccgtggtgctccgcggcgcggccttgctctcttccggtcgcgggacaccgggtgtagagggcggtcgcggcgggcagtggcggcagaatgttggctaccagggtatttagcctagttggcaagcgagcaatttccacctctgtgtgtgtacgagctcatgaaagtgttgtgaagagcgaagacttttcgctcccagcttatatggatcggcgtgaccaccccttgccggaggtggcccatgtcaagcacctgtctgccagccagaaggcactgaaggagaaggagaaggcctcctggagcagcctctccatggatgagaaagtcgagttgtatcgcattaagttcaaggagagctttgctgagatgaacaggggctcgaacgagtggaagacggttgtgggcggtgccatgttcttcatcggtttcaccgcgctcgttatcatgtggcagaagcactatgtgtacggccccctcccgcaaagctttgacaaagagtgggtggccaagcagaccaagaggatgctggacatgaaggtgaaccccatccagggcttagcctccaagtgggactacgaaaagaacgagtggaagaagtgagagatgctggcctgcgcctgcacctgcgcctggctctgtcaccgccatgcaactccatgcctatttactggaaacctgttatgccaaacagttgtaccactgctaataaatgaccagtttacctgaaa

SEQ ID NO: 144 - protein, 169 aa, Homo sapiens
MLATRVFSLVGKRAISTSVCVRAHESVVKSEDFSLPAYMDRRDHPLPEVAHVKHLSASQKALKEKEKASWSSLSMDEKVELYRIKFKESFAEMNRGSNEWKTVVGGAMFFIGFTALVIMWQKHYVYGPLPQSFDKEWVAKQTKRMLDMKVNPIQGLASKWDYEKNEWKK

SEQ ID NO: 145 - DNA, 776 bp, Homo sapiens
  misc_feature (590)..(590): n is a, c, g, or t
acacaagaattacaaatatatttaaatctcagacctgggaaatggactatacacagccttctaggggagaagagaaatgccttaaatgttctgacagcactgcacctttggcttgttttcagtggttggtggaacatgaataggaaccacattgttgcttggagacatgtcattttcgcgtctgtctgacatttgcttctgagaaacaatgcggtaaatctctgttaaaattgtctgaaaagcagcttctacatttgtagagtctagggccgaagtttcaatgaatgacaaaccattcttttctgcaaaagctcttgcttcatctgtaggaactgccctgagatgacgtacatcactcttattgcccacaagcatgataacaatgttactatcagcatgatctctcagttctttcagccatcgctctacattatcatatgtgagatgcttagcagtgtcataaaccaataaggcacctacagctccacgataatatgctgatgttatagctcgatatcgatcttgccctgctgtgtcccatatctgtgcctttattgtttttccatcaacctggatgcttcttgatgcanactctactccaatggtgctcttgctttacagataaactcatttcgagtaaatcgagacaggagattactctttccacaccagaatctgccatatgacaactttaaagagtagtcgtactcgtcgtcacgggtgcccattgcgccggcgaggagcgaagggcgggagcagcaatggtatctggggga

SEQ ID NO: 146 - DNA, 568 bp, Homo sapiens
  CDS (30)..(512)
gaaccgccatcttccagtaattcgccaaaatgacgaacacaaagggaaagaggagaggcacccgatatatgttctctaggccttttagaaaacatggagttgttcctttggccacatatatgcgaatctataagaaaggtgatattgtagacatcaagggaatgggtactgttcaaaaaggaatgccccacaagtgttaccatggcaaaactggaagagtctacaatgttacccagcatgctgttggcattgttgtaaacaaacaagttaagggcaagattcttgccaagagaattaatgtgcgtattgagcacattaagcactctaagagccgagatagcttcctgaaacgtgtgaaggaaaatgatcagaaaaagaaagaagccaaagagaaaggtacctgggttcaactaaagcgccagcctgctccacccagagaagcacactttgtgagaaccaatgggaaggagcctgagctgctggaacctattccctatgaattcatggcataataggtgttaaaaaaaaaaataaaggacctctgggctacaaaaaaaaaaaaaaaaaa

SEQ ID NO: 147 - protein, 160 aa, Homo sapiens [sequence omitted]

SEQ ID NO: 148 - DNA, 3820 bp, Homo sapiens
  CDS (307)..(3030)
cagcagtgagtcggagctctatggaggtggcagcgggtaccgagtggcggctgcagcagcgactcctctgagctgagtttgaggccgtccccgactccttcctcccccttccctcccccttttttttgttttccgttcccctttcccctcccttccctatccccgacgaccggatcctgaggaggcagctgcggtggcagctgctgagttctcggtgaaggtatttcatttctcctgtcccctcccctccccaccccatctattaatattattcttttgaagattcttcgttgtcaagccgccaaagtggagagtgcgattgcagaagggggtgcttctcgtttcagtgcttcttcgggcggaggaggaagtaggggtgcacctcagcactatcccaagactgctggcaacagcgagttcctggggaaaaccccagggcaaaacgctcagaaatggattcctgcacgaagcactagacgagatgacaactccgcagcaaacaactccgcaaacgaaaaagaacgacatgatgcaatcttcaggaaagtaagaggcatactaaataagcttactcctgaaaagtttgacaagctatgccttgagctcctcaatgtgggtgtagagtctaaactcatccttaaaggggtcatactgctgattgtggacaaagccctagaagagccaaagtatagctcactgtatgctcagctatgtctgcgattggcagaagatgcaccaaactttgatggcccagcagcagagggtcaaccaggacagaagcaaagcaccacattcagacgcctcctaatttccaaattacaagatgaatttgaaaaccgaactagaaatgttgatgtctatgataagcgtgaaaatcccctcctccccgaggaggaggaacagagagccattgctaagatcaagatgttgggaaacatcaaattcattggagagcttggcaagcttgatcttattcacgaatctatccttcataagtgcatcaaaacacttttggaaaagaagaagagagtccaactcaaagatatgggagaggatttggagtgcctctgtcagataatgaggacagtgggacctagattagaccatgaacgagccaagtccttaatggatcagtactttgcccgaatgtgctccttgatgttaagtaaggaattgccagcaaggattcgtttcctgctgcaggataccgtagagttgcgagaacaccattgggttcctcgcaaggcttttcttgacaatggaccaaagacgatcaatcaaattcgtcaagatgcagtaaaagatctaggggtgtttattcctgctcctatggctcaagggatgagaagtgacttctttctggagggaccgttcatgccacccaggatgaaaatggatagggacccacttggaggacttgctgatatgtttggacaaatgccaggtagcggaattggtactggtccaggagttatccaggatagattttcacccaccatgggacgtcatcgttcaaatcaactcttcaatggccatgggggacacatcatgcctcccacacaatcgcagtttggagagatgggaggcaagtttatgaaaagccaggggctaagccagctctaccataaccagagtcagggactcttatcccagctgcaaggacagtcgaaggatatgccacctcggttttctaagaaaggacagcttaatgcagatgagattagcctgaggcctgctcagtcgttcctaatgaataaaaatcaagtgccaaagcttcagccccagataactatgattcctcctagtgcacaaccaccacgcactcaaacaccacctctgggacagacacctcagcttggtctcaaaactaatccaccacttatccaggaaaagcctgccaagaccagcaaaaagccaccaccgtcaaaggaagaactccttaaactaactgaaactgttgtgactgaatatctaaatagtggaaatgcaaatgaggctgtcaatggtgtaagagaaatgagggctcctaaacactttcttcctgagatgttaagcaaagtaatcatcctgtcactagatagaagcgatgaagataaagaaaaagcaagttctttgatcagtttactcaaacaggaagggatagccacaagtgacaacttcatgcaggctttcctgaatgtattggaccagtgtcccaaactggaggttgacatccctttggtgaaatcctatttagcacagtttgcagctcgtgccatcatttcagagctggtgagcatttcagaactagctcaaccactagaaagtggcacccattttcctctcttcctactttgtcttcagcagttagctaaattacaagatcgagaatggttaacagaactttttcaacaaagcaaggtcaatatgcagaaaatgctcccagaaattgatcagaataaggaccgcatgttggagattttggaaggaaagggactgagtttcttattcccactcctcaaattggagaaggaactgttgaagcaaataaagttggatccatcccctcaaaccatatataaatggattaaagataacatctctcccaaacttcatgtagataaaggatttgtgaacatcttaatgactagcttcttacagtacatttctagtgaagtaaacccccccagcgatgaaacagattcatcctctgctccttccaaagaacagttagagcaggaaaaacaactactactatctttcaagccagtaatgcagaaatttcttcatgatcacgttgatctacaagtcagtgccctgtatgctctccaggtgcactgctataacagcaacttcccaaaaggcatgttacttcgcttttttgtgcacttctatgacatggaaattattgaagaagaagctttcttggcttggaaagaagatataacccaagagtttccgggaaaaggcaaggctttgttccaggtgaatcagtggctaacctggttagaaactgctgaagaagaagaatcagaggaagaagctgactaaagaaccagccaaagccttaaattgtgcaaaacatactgttgctatgatgtaactgcatttgacctaaccactgcgaaaattcattccgctgtaatgttttcacaatatttaaagcagaagcacgtcagttaggatttccttctgcataaggtttttttgtagtgtaatgtcttaatcatagtctaccatcaaatattttaggagtatctttaatgtttagatagtatattagcagcatgcaataattacatcataagttctcaagcagaggcagtctattgcaaggaccttctttgctgccagttatcataggctgttttaagttagaaaactgaatagcaacactgaatactgtagaaatgcactttgctcagtaatacttgagttgttgcaatatttgattatccatttggttgttacagaaaaattcttaactgtaattgatggttgttgccgtaatagtatattgcctgtatttctacctctagtaatgggctttatgtgctagattttaatatccttgagcctgggcaagtgcacaagtctttttaaaagaaacatggtttacttgcacaaaactgatcagttttgagagatcgttaatgcccttgaagtggtttttgtgggtgtgaaacaaatggtgagaatttgaattggtccctcctattatagtattgaaattaagtctacttaatttatcaagtcatgttcatgccctgattttatatacttgtatctatcaataaacattgtgatacttgaaaaaaaaaaaaaaaaaaaaaaaaaaaaa

SEQ ID NO: 149 - protein, 907 aa, Homo sapiens
VESAIAEGGASRFSASSGGGGSRGAPQHYPKTAGNSEFLGKTPGQNAQKWIPARSTRRDDNSAANNSANEKERHDAIFRKVRGILNKLTPEKFDKLCLELLNVGVESKLILKGVILLIVDKALEEPKYSSLYAQLCLRLAEDAPNFDGPAAEGQPGQKQSTTFRRLLISKLQDEFENRTRNVDVYDKRENPLLPEEEEQRAIAKIKMLGNIKFIGELGKLDLIHESILHKCIKTLLEKKKRVQLKDMGEDLECLCQIMRTVGPRLDHERAKSLMDQYFARMCSLMLSKELPARIRFLLQDTVELREHHWVPRKAFLDNGPKTINQIRQDAVKDLGVFIPAPMAQGMRSDFFLEGPFMPPRMKMDRDPLGGLADMFGQMPGSGIGTGPGVIQDRFSPTMGRHRSNQLFNGHGGHIMPPTQSQFGEMGGKFMKSQGLSQLYHNQSQGLLSQLQGQSKDMPPRFSKKGQLNADEISLRPAQSFLMNKNQVPKLQPQITMIPPSAQPPRTQTPPLGQTPQLGLKTNPPLIQEKPAKTSKKPPPSKEELLKLTETVVTEYLNSGNANEAVNGVREMRAPKHFLPEMLSKVIILSLDRSDEDKEKASSLISLLKQEGIATSDNFMQAFLNVLDQCPKLEVDIPLVKSYLAQFAARAIISELVSISELAQPLESGTHFPLFLLCLQQLAKLQDREWLTELFQQSKVNMQKMLPEIDQNKDRMLEILEGKGLSFLFPLLKLEKELLKQIKLDPSPQTIYKWIKDNISPKLHVDKGFVNILMTSFLQYISSEVNPPSDETDSSSAPSKEQLEQEKQLLLSFKPVMQKFLHDHVDLQVSALYALQVHCYNSNFPKGMLLRFFVHFYDMEIIEEEAFLAWKEDITQEFPGKGKALFQVNQWLTWLETAEEEESEEEAD

SEQ ID NO: 150 - DNA, 924 bp, Homo sapiens
  CDS (105)..(458)
gctccgctgaatccgcccgcgcgtcgccgccgtcgtcgccgccccccgtcccggcccccctgggttccctcagcccagccctgtccagcccggttcccgggaggatgaagttcgtgtacaaagaagagcatccgttcgagaagcgccgctctgagggcgagaagatccgaaagaaatacccggaccgggtgccggtgatagtagaaaaggctcccaaagctcggataggagacctggacaaaaagaaatacctggtgccttctgatctcacagttggtcagttctacttcttgatccggaagcgaattcatctccgagctgaggatgccttgtttttctttgtcaacaatgtcattccacccaccagtgccacaatgggtcagctgtaccaggaacaccatgaagaagacttctttctctacattgcctacagtgacgaaagtgtctacggtctgtgaagctgctgcccctgagctggaggggggtctcattctacaaagagagaggtggcccccctttcttgacctcctcctccttcaagctcaaacaccacctcccttattcaggaccggcacttcttaatgtttgtggctttctctccagcctctcttaggaggggtaatggtggagttggcatcttgtaactctcctttctcctttcttcccctttctctgcccgcctttcccatcctgctgtagacttcttgattgtcagtctgtgtcacatccagtgattgttttggtttctgttccctttctgactgcccaaggggctcagaaccccagcaatcccttcctttcactaccttcttttttgggggtagttggaagggactgaaattgtggggggaaggtaggaggcacatcaataaagaggaaaccaccaagctgaaaaaaaaaaaaaaaaaaaaaaaaaaaaaaaaa

SEQ ID NO: 151 - protein, 117 aa, Homo sapiens
MKFVYKEEHPFEKRRSEGEKIRKKYPDRVPVIVEKAPKARIGDLDKKKYLVPSDLTVGQFYFLIRKRIHLRAEDALFFFVNNVIPPTSATMGQLYQEHHEEDFFLYIAYSDESVYGL

SEQ ID NO: 152 - DNA, 192 bp, Homo sapiens
  CDS (1)..(192)
atgttgggccagagcatccggaggttcacaacctctgtggtccgtaggagccactgtgaggagggccctgggaagaatttgccattttcagtggaaaacaagtggtcgttactagctaagatgtgtttgtactttggatctgcatttgctacaccctttcttgtagtaagacaacaactacttaaaacataa

SEQ ID NO: 153 - protein, 63 aa, Homo sapiens
MLGQSIRRFTTSVVRRSHCEEGPGKNLPFSVENKWSLLAKMCLYFGSAFATPFLVVRQQLLKT

SEQ ID NO: 154 - DNA, 1370 bp, Homo sapiens
  CDS (308)..(679)
ggcggcggcagctgtacagggcgggagaagcggtggtagcggaggctgtagtggggctggtggtgcttccaactgcgggacaggaagtggccgtagcggcttgttggataagtggaagatagatgataagcctgtaaaaattgacaagtgggatggatcagctgtgaaaaactctttggatgattctgccaaaaaggtacttctggaaaaatacaaatatgtggagaattttggtctaattgatggtcgcctcaccatctgtacaatctcctgtttctttgccatagtggctttgatttgggattatatgcacccctttccagagtccaaacccgttttggctttgtgtgtcatatcctattttgtgatgatggggattctgaccatttatacctcatataaggagaagagcatctttctcgtggcccacaggaaagatcctacaggaatggatcctgatgatatttggcagctgtcctccagtcttaaaaggtttgatgacaaatacaccttgaagctgaccttcatcagtgggagaacaaagcagcagcgggaagccgagttcacaaagtccattgctaagttttttgaccacagtgggacactggtcatggatgcatatgagcctgaaatatccaggctccatgacagtcttgccatagaaagaaaaataaagtagccaattctaaaagtagccctctttctcctggatcttgctgaattagtggcttggggggtgggggagataaaaagaacttaaaatgggtaaagtaagaaatgttaaaaagtccctgttttgtcctgaaattttagtctattctgggtaaataggattttctgacacagatatgagaagttgtagctctgatgtctagctgtagtctccttgatctgctgattgcattattttaatttgcttttctgggaaagcagttttgctaaaagctgtacagactttttcttttgtacctagcagtactttatatagtatagctttgggccatgtagcattttaagactcaattttaaaaaattattaatctgttgctgactcttaattcctatttcaatatgtgtttccttgaagaattcaggatacaacttcttgtgtatgacagctttccttcacacactatttttgtgggtgtgtatatatctgatttgggaagaatttaaaaaacacatagctttttaatttgtttgaaacagactttctgcctgttacatttttgcttttaaccaattaaagaagccaatggcattttagttttatattgtgttttccactagtatatccctgttgatttgtttgtgccttttattaactgccattttctaaaatttttttcaataaaaggaaggaagatgtg

SEQ ID NO: 155 - protein, 123 aa, Homo sapiens
MHPFPESKPVLALCVISYFVMMGILTIYTSYKEKSIFLVAHRKDPTGMDPDDIWQLSSSLKRFDDKYTLKLTFISGRTKQQREAEFTKSIAKFFDHSGTLVMDAYEPEISRLHDSLAIERKIK

SEQ ID NO: 156 - DNA, 124990 bp, Homo sapiens
gatctttaacattaagcttttctaaataagactgaagatcaaggattagggtaaaggaaagaatgtcctgaagtctcttctttgttgctatcacaatggaggatcaacacatgggctggtgaccagcttggtgtgatataatagaacactccagagacccgagttctagtcacaaccttcaagttgtcactgccacataccacatctttctattatctatttaacgcagttggttaaactctaggatggcctttacagttccaatattctgtggttctggggatagatctacacactgaaaagaatattcaattactctgctaatcagaatgtgaagtgacttaggtttctatacatagaagcttaagtttcatttgcttattcaacaagtatttactgaatgctagcgtcccaggcaaggttttaactgaataacagcacataccctagaaaaacagttaacaaatgctgacaacgctgttttccctggccaagaacaaagactcatttatttgaggcccttcctacttgcagatgctaaaatacgcttattttttaaaaaatcaaatagtggcaatatgcaatagtggagttttttgggttttttttaatgtccttatttagcaaaatcaaagttaggtgagaatttgaaaaaaaaaaaacaaaaactaagttagtccctacgtcagctctcaacattattactgtattttagaaacttgactaatatgtgaaactgtaattttggggaactccacttctctactgacatcctttccaaaaagagacaccagctctacagtctcgggattagaaatatgatgtgaggccgggcatagtggctcacacctgtactcccaatgctttgggaagccgaagtgggtggatcacttgaggtcaggagttggagaccagcctgaccaacatggtgaaaccccttatctgctaaaaatacaaaaattagctgggcatggtaatacacacctgtaatcccagctacttgggaatcacttgaacccaggaggtggaggttgcagtgagccaagatcgcgccactgcattccagcctgggcaacagagcgagactttgactcccccctcttgcccaaaaaaaaagaaatatgatggagtgttatttcccactcagggaaacagcataacttagttactgaaaatatttattaacagacagatgttttggttccaattctcaattatctgggttaaagaagttaccatcagtctccacacaagaccttgtaggattatttctctgcagtgaaggacaatgaaggaggttcagtgggaaacgatcttaggacagaggaagtttccactttgcctgggagggtgaacagcctgggagacctggagatgagggcaggcattctaggccaaggggtcttcttgtgtggtcagatggggaaggaaaccctcctggcaaaacagcagcaattctttctccaggaaagcttctgagactgactctaatagtcaattgtgatcaactgtcctaggctcccagggccacagcaatccttaggcaccccaaatgtgccatccctgactacccagcacaccctaaccccaaagcattgtgacagctcaaggatgacttcctctgaaaacctctgtccagatctaaaaccatcctgtttgtttgcttgtaactgtctttttctaaaagtaacacctcaggatggagactctgttgccttgtccactgctgcccccaatgcctggaacaaggtgcctgacacaggagtaggcacgcgacacatagctggtgaataaacgtcacggaattagcacacgtgtagaatcagtacgcacatgtttggccacagtcactaaacgtaactgatcagaaattaaaattaagttgcatgttcatcaaaacttctacatggctatcagtgactgccatctaattgccattctgcaacttcaagagtacaatttcaagagcgtaataaaaaaatcatatttaatcacaccataaagttcatcagcacaagcaaaacaaaaactgcactatttggatttatactcactctccttacgaccctccaaaacaaaaatgctgggcatcctagggctatctctgacagcaaatgccttcagctcttgacttagaaactgctaacatactagacaaaacactttccttaaactctaagacaatgaataatactttaaaccaggtttacatcgcttaaaaccaattcgctcatcagtaatcgttaaagtggttgtaacaataaagatgttaataacagaatacagcaaaatagaaattctaatctactaacagcaaatcaccattccaattgaatggtgtgtgtgcacaaacacaagccttcccagaagcctccagctctccacactcctgcacacagaaggcagcagtaaaccgatggcactgctgttaaagtaaattgtctttctcaacaaagaactggaggggaaaaggaggatattataatccaagactataatctaaatgcttctagcttgcaagaaagtgagcattacgaacacgctaagcttactgacaagtacttcacaaaaatggtttccaatgtttaaaaacattttaaaatctttactcaggtaaacgacagaacttaactcatataccccctaacacctaaggcaagtgggctattgagtatagccatattttgaaagaaacttctattgggattatttcagtagatacttttaaaatttaccagagcataatctttgaaacccagtgggaaccacactgctacaaaaggctggaatagaagtgtgatgttctttaggtcactaattacacactgatttgtgactaaagctaccatgaattctaccactacctatagatcttgaaattagcaaataggacacattatacactgcttaataaaaagcacagtaatctgtgcttaagtacaactaactaggtacaacagccactttgctgacaattactgtaacttgggaatatttttctttacatcctgatgtactcaaactgttaacttttagaaacagcacagcctctttgtttcttctgcttaataggttatcttacactgttgatatggaatatgtatctaccataatacaaagcaataaggtattcaagtcctcaaaaacacagaaaaattatatttatacacaatttgtcatactgctaacaaagctactttttcccaagttactgaggtgtccaaataaggagttattaaaaaattcaacttaaattgctattctctggccaatgcatttgtaccctgaaaactacaaaattatctccaagacctggctagaagtttacattttctctgaaagtttttcctctgtcttttacacacagtattttttcttaatctgacaagtggagaaaactctgcatagccatctactaacaatcaaaaagctacaggtttttttattttttatttttaatgctctaaattcttcaacactgtttcaaggaaattactaggggtcacacccacgaggctaaatggtcaacccaactttcctaatttagctgtggaaagatgcttccaagttaagcgaaagaaaaagattggaatattcaaagtttatatttaaggttacaacctaaactcttcaacttgggaagcttgtaaaggaaataatttcattttgctgaaattgttcataaattaccaattttaaataggattagagaccaaagtactataaaaatataatcatatagcatatttgagtgtcattaactagaaactgcctgaattcatcctaaatcagttaaggtcagttaagggatcttagtaagaacttaaagtataacatactagttttagtttcaatattaacagatactgtcatctgcaaagtggtttttaaaaacatcctgatctgaaaaaaagttataaggaaagtgaatttttaaaaactttaattaagcaagactaagcattgctatccatttctcctattactactacttaaccagtacaaccttaaatatctgtaaaaatttgacaggcctaactgcaccaaaaaaaaaagatttcagcaaattaattaactgttaataaactgttctatctttacctgcactaactctctgcaatgaaaacactgaacgtgtgtatacacacatctatctatatatatatacacacacaaataactatacccactactagaccagtacaccataccactttttccaatgagcgctctgaattaaacacaattcaagtaacctagctaaatacaagcttaggcaatgccttttaaggcataagatcattcttctgcaagatttaaatattcccctccccatcctatcttttgctgactacatactaaagttgtatatctggctctttccagtcacctgtttgctttcaaaatcaagggggaaagtctcctttcaattaataatacaatcattgttcagtcgatttataaactgaagaaaaactctatattgattacaaaagaaagaaacacttcttcagtataactgagatgctttatgttatccttatttgatagaggtagaagtaaaagtaactattattcctaatgctgattcaagaaatgtctagagtctacatttccagtccatttaactacattttaaattccaaaggtttccagacacaccagaaaataatggaacaccaatacagaaacactacacgagtctgttaaaaacctagcttctgagtctgggggagcttttctataggaagtacagtcatgtggaggtcagaaacaagttttgtaaagcttaataagaacaaaggctaagtaaggaatccaactaactctctcatacaacttcttcagctgccctttcaggtttagtaattttacttctcaactttatcataaaattaccaaactgtccccaaatttccagtaactcaattatgctgataccctgggcaggaagtaatggagatgttcagaacagtcagtcaacaaatgttcaaatggaaagcattccaacattaaatataaaagggtaatatgtggcggcagctggctagcgggggcttcccccctatttatctggaagatagatgtgtacaataattgagcatgtcatcgtgagctgcagattttaggaaagaatggtccctgttcttccactttcttaaagtcagatttctatctctcttcgtggtctaaattcaaaaacctttgccccagataccactgcaaatttgtctgttattactggttggggaaaaataacccagttcaccttactccaaaaacatgagcatttcagaaaagtttttattctgcctctaaaatgaggccattaagtgatattcaataatcaggcttccttcacccgaattcaagaaatttcctgccgtctttgtgtaataaacttttttcttccatgtgcattttaattttaacacccctccccgccgcagaatctggaaaagaggtgtgcggatcaagacccctccacccgccattgtctcaagtttaatttacatgctgtaaccaaacccttcactctttcgaatatttaacaagattgagattcctttaattccatgttggtagctgttctgtaaatacctttcaggtttttattttttaatatcccagtaatctaaaaactattctgttgttagatttcaattgaaggaactggatttaaaatcttattacgtttattttatcagtggaatactcagtttatgcaactgtctcatgtttttcattcctactttctaattctaaggcttgaaaacagccattgctcagtccttcagcttcaccttcccaattcattcattaaacattctgctcagggattaaactgaaatgggaaattaggaaagaaccatttaaaacaaatcatacccagcaacctcaaaatctataacatacaggccatatgggcatacaggaaatgggacaatttgaatttttttttttaagcaaatggaaacaaagcttcatataaaacataaaaagggtccaatcatttactttcaaatagagtcagctaaaagtagctccttttttaaagtggcatctttcaggcagtcaagagtcattaaaactactccaaagttcttatcaaccaatatcatgtttgtgacaactgtgagaaaagaatgtaattttataaagtgggaaaacagcacatcttttgggacccctgaggctctaatcaggcatctcagaattaagagtgctccagggttgggaaatggctaccctgctgtggcgaaaacatgccatttcataataaacgttgttaagagagaaaaaagtgataagcatgtacctgcaatgaggagatagaacgacttagtcattgccaggccattatattccttaattatttcatcagtctataagtgacttgatgattaagtcttattttcagatttcctccaaaacaagtccactggaaggggattaggggctcctactcctccctgaacttttcctgccaaaaatggaggctcacaaagaaaatgcaaatctacccccaccttaaaaaagtaaaggcagtcaaagtcaaaaccttcactgctcctccttcctcccctactacgtggaaaaaaattttgacctgttaccaaaatagattcctcagggtaaaggggagaaaagttttctacaaattttttctaagtggtgtattagttcctttttttgagtaagaagtgaaagggaataggaacccaacacaactgctaaacttcgatctcacaagttattaaaaaacagcaaaggtcaaactgcaaagcgttagaaaaatgtgaagacaaaaggattaaaagagtgggacactaaagaaaaaagtgtgtgtccttcaccaataaaagtcgtatcttgtcctctacttcctccttctgtaggcaaataaagacaattctaaaggactagctttcctcatcatgccaaataattaaaattccaaacagattattaatcctattctaacaattaaaataaatgataaatctgccttgtaactactgacaactgtattttaaataacttacggcctcttgaatttaaatataaccgattaaaaatggcagcaacatcagggttaagaaacaaaatgaaacactattagtctccagaatattgaacaaaacaatatctaaaataaatatgacttctcagaaggaaaaaagttatctaccattaaggacataccttaaaagttcttagcacacattaagtaagcacaaactagtggcttgcctgttatattttcagacaaaaagcaatgaggttattcctctgcacttgtcactgcagacacataaaggcttttagaaactacatctattactcattgtctaagtatcataaaacttagcattttaagtcttgtttgatatcaatcaagaaagaacatccacttcaggggaaagaagtacagtaaaataagaacattgtaaatgtccctcttgacatatacaaaagagaaggtaaaaggcctcctaagacccctacctagtggccaggcctggacggcagctgttgctacctcaccttttcttttgttgagcttaatctcatgtcaagtcattcaaccaactcaaaagcgatgaagacattattgaatcaatctgaactaaatcagacctaggcttcttaaaacatacagcttaatgcttccaaacgatctagaaaactaagaaacctagctacgctgtaggacacactttcatatgcgtccgtgtgaagagaccaccaaacaggctttgtgtgagcaacatggctgtttatttcacctgggtgcaggcgggctgagtccgaaaagagtcagcaaagggagatggggtggggccattttataggatttgggaaggtaatggaaaattacagtcaaagggggttgttctctggtgggcaggggtggatctcacaaagtacattctcaagggtggggagaattacaaacaaccttcttaagggttggggtcacggcaccaaatttcatacacgtccgtgtgaagagaccaccaaacaagctttgtgtgagcaatggcctggcctgggctcagaggcctgacacacacagtggccaattatacaggacccccaaactggccagtggaccactgcaaccgccatttactttctccgctgcaagcaccataggctgattcaggaagataaactgaggctcaaggaatttcgaagtggaacaatacaccaaagccttaaacctgaaatgactatccttttctggggggtgggggggaaagaaaaagaaaaaaaagtttctggggctctcagggtggcccagatgccagggtcccagaagtggccttttctagctcctgtaactaaacctggcggaaaactccccgcctgctcaccccatccgcccaagaatgcgccttcccgtcttcggtggccctacccagaatcccaaaatgtggattccaacccaggccctgaacgtcttctcaaatccccgggacttacgttgcggcgcgcgccccgctgtcgggtcttgcccctcgggcggtaccgcccaggcagccctaaatccagcctcccaggcccccagcagcgccctccgcccctccaccatcccgtccggctcgcagtcggggccaaatcgagagacaagagggctgtgcctgaaactgagcggtttcaccacttggcacctcctggcagaaacttccctttaaaaaaagaaaagaaaaaaaaaaaaagcagcagcacttttgggctagcatttcaatccttcctgccctttagagttcccagttctgcttccagctgcctttgggtgttccactacaattgagttgtaaagatattctttaagtgtttatagaacattaagacttaagaaaaatctttaaaattagaggagggaaaaaaaagccaccttatcgcacacatccaggaaacgcagccccgtgcatccctgctcagggataagcaggcgccccaggactcccggggacagatttttgggcacccgagggagtcacccggcgcacctcggggtccgcggagaggcccagcccctcccgcggtcccttagacgcgccctccgcctggcccgtgtggaccgtcccggccattgtttacgggggaagcctgtcccgacgcattgttttggccatttccaacttcccccggcccttcccggggtatcgcgggggaccctacgccaacgtcccccctccgcccgcgccccaagggccgactgggcaaattgggagacccgccccgcggggcgacccaacttttcggaacagccccccaccgcccacccccgcagacccccggacccccgctcccggcggagattcagggaaccccgcaccccaagcccttctgaatcgtgcggcgtgagtgtgacggccaagagcggatgcagcccgggatcgcccgcaccttcccgccagcggaagcgcaggagccggctggggagggggcgccctagaaagagcagctagaaagctgagacggggaactgaggtcatcctggggggggacaagacaacgagagccgggcgcctcgggggcggcgcgggagcctccgcaggaccaggcgggcgccccggctggcgcgggcggggggcgcccccctttacctgtggctccggcccctcggccatttcctcgcgcggcggctgccgggactgagctgactccactcgggccggccgggtttgaaagaggaggagcgggcgcggaggggagggggcggggagggcggagggagggaggcctcgcgcagttttctcggccttttgtgcggacacctcccggattccgcgcccgcacccggccccccaaaagacacggggagccgcaagcgaggggtgcagccatctgccgaggcgcctagtgccttcgcgcctccaagacccccaacaaaaaaggagcgtcccgcacccccacccccgcccggaggatttaggggccgggctcacctcgggcgcggggctaagtgcaggcgcggggggggtccctagagccgccagggcgcggcgcgtccggcgctgggggactgttgggtcagaaagtgttcagggagcagctgctgcgccctccctcggcccgccgctcggagacgccccgccccgccccaccccgcccccgcgcccacgtgactagcataggcccgcccccgctccgccccccgccacagactccgcctccgggacgcgagcgagcggcgagcgcgcgcactcccagttatcgctcggcgactcccgcgcacgcacgcgccgtgccaccctccccgcgccccccgccccatacccctactcccgccatccgatttaacgtggcgggcgagcgccgcggcggtagccgtgacaggtacccggcggggggggcggggggggccgcgagggtgtgcgcaggcgcagacccgggtcccgtccccgccgccccctcctctgcaaggtgtgcccgggcgaggggaggggcccgcggcccgaactcctgggtcaccccgaattacaaacaaaaccttaacgccgttgctcgcgggttagaaggcagctgtgcgcgaaaaacacctcagattttcttcaagcgtgaggaaggtcgagaagataaagtttttaaatgagtatcttcagaaagctatttaattgttctgatttttttttttctgaaaggactgggcttgcgctattctaacttgagatttctaaacttagactaggttccaagaatctacttggttttgatagaaatccatttggaggaaaccggggacaaaaaaaaacaaaaaaccgctaccctttcccctcctccctacgcacaactcatttaaatcgtttcccaactgttttttttttcttactgaaaaaaaggacaaaaaaaatcctgattcctaaggcctgtgatatttccccattttaagtaagcctcgaggaaccacagacataacaaacatatccacaatttttctaccccaaaatgcaaactaatgcaaatgtgaaatggatctatgcaagtcgctaccaacaaaatagccaaatatttgtttttttactggccttcggcatatccaaaatgaaaaaactttaaaacacatcaagaaaagcatttaaaatatctatttcctaaatcaaaagaaagaacgcactacagaaacgatccggagctggtgagcaatgcaatcttaataaataggaaaaggaatttgagaagacagctcagcaaaggggaagaatttgccaagtgtcatgttttgctgtcattttatatataactactaaccccccatatggtctggttagtcttttttaaaaaggaagccaatcaattactcacaattaattagcagtgccggtagattcttaggccagcactaaaaaactaaattgggtgaattttttttcactcaagtccactgatattgatcacttttagtattaggagtccttttctgacaaaagatgaatacctatctttaaaatatattttttaatcttattgtcacattctaaaacacagtccaaaaacacttcataaacaagaaacttcatttaactttatgaaaacaaatgactatgagccttgctacacaacaaagaaactatgaacaagtgcaaccaggttgagcctttaagtgtagcctcattctacatgttaatggataacctttgaactctgagaacttgaatgctgtaaacacaatagcactgacagttaaaaattccagtgtcaaaatcgagcaaaaagaaaagtccaaacttttcagggggaatagggaaacaatcaaatattttgacaaataatcgtttcagtaagaacaaggagattcctggctctcagaccttgttgctactgaattattttctgagcaaaaacggttgtgcttgttttccccctgtgccctccaaagctaccactttgttcacattatagcatcatgatttgttactgtttcgctgcctccctcaaaaaaaaaaaagtgccttattatgttgtagcttttaaaattgaaagatgattatattcactgatctatccgctaagagttttatttatatgtgatcctccttatgtttgagcaaagaattacaaagaaccttgtcctggagtcgtgccaacgaaactgggaaatcgttgcaaaattctgccagtgactgactgctgggttgcaaatacatactgtgttttcagaagaacatagagggatctgaattcgtccgggagggcttccctgagacacattcttcccttagaatgtgagactcatacctcccatttatttggaaagcatgtatagttcaaacaattaaaatatggaaactccaaaagtaacaggagaacactgcaaacatttggttttgtaataaaagctagaaactcataactgcatgaagtgaaaattgaaaatcgaacgttggtcttcctatgcttagctccacccacaagaaatccagctttgccatcactcccttcctaggccatctctaaaggagtcaggtgctactagatgccagcaaaaaaaacaaagaatggaaccaaaagagaagctctgcacatggtacttggagaaggggcagaaaagccccacttcaccttggttcaatgcagcaaacatcagctacacctcatttttcacaattgtccaaacagctcaggcagagctgacgaggagggtcagcaccttctgccacctcctgctgctgagctgtgcacctgtcccgcagttaactttctctgagctgagtcaacctgagcccacctgtggggagcccaaagcttggtggagacagatgccagctggggccctttgttgggagaagctaaaggacctggtgactgcatgtgggggcaagaaaaggaagactccaagggtttgctcaggactctggcccaggaaatgggggactgtgggactggaaggggcctggtggggagcagcagggggtgctgagcttgtttggcaccctctgagctggagaagtgtgtggaggctgggagaggggcccagagggactggaggtatagacaagacatgctcccagcttccctgggtcgcaggccaggcactatttgatagatgagatcatcgagttccagggaggaaggagagcgggccatgtcaccaaggtcacccagtgatgagcatccctgccgacaggagtccagctatcccagtccctccacagtccctgggactttgctgctgaggggctcgggctctccgggcgggagtcccaaagacaggaacagggcagacttagagcccacatggaggctgattctttgggcggccttgggcaagtctcttcacctttctgaggctcagttgccgcacctgtgggtgtgaaatgcctccttccataagggttggaaggattaaactagagtttatttttattttttatttatttatttattttaatgtcatagcgctggacccagcagcaggtatttagtaagcccggcgggtggtgagcatgtcctccccttccccttctggctgaagcagttaggaaggctgcctggaggaggcaggccttgaaggtaagggctgattcagagagactcagaatgagcacaggagagactgccgggctccccctggccccggggcccctgaacacaggccaagggctgtggaccttctgttgtcacagctgcccatccaggccccacagcactggaaccgtagccagagagagctctgcctgagaatgggacaagaaaacaagcccagccgggcgcggtggctcgagcctgtaatcccagcactttgggaggccgaggtgggcagatcacgaggtcaagagatcaagaccatcctggccaacatggtgaaaccacatctctactaaaaatacaaaaattagctgggtgtggtggtgcttgcctatagtcccagctactcgggaagctgaggcaggagaatcgcttgaacctgggaggcggaggttgcagtgagctgagatcatgccactgcactccagcctgggtgaaaaaaagaaaagaaaagaaggaaggaaggaaagaaagagagaagaaagaaaagaaggaaggaaggaaggaagaaaggaaggaaagaaaaaaaaagaaaagaaaagaaaaaagaaaagagagagaagccctgattgccaccagcagctcataccgattggccccaagcctggccagcgaatgttcaaaaagcctccctgaccccattgcatctgctctaggcaaagtcttgttttctggaaggaaagcagcatttattaaagacactgctctgctctcacgcttgcatgagcctcttgcccatgacgttgctgccctgagatgcaagtaccattactaccctcagggaaggagaggtcttgccgaacccagcatcttgactgcagagctggggctctaaccactgggctgctgccttttgtaaatgaatggctccccatctcctgcgagctcctgagggcagagcggagtctcccctgtgcctggcatgggccctgcattcagcagcctcctcaggaattttgagtaagtgaataaagacatgtaagggtgacagttcagtttcagagtgacccagaggcatcgccctaagatgcaaagatgcagtggatctgaacagttggaggcggaatcacctgggaatgtatagagtagcttccagaaggacacacaagggaccaggcacggtggctcatacctgtaatcccagcattttgggaggccaaggcgggcagatcacctgaggtcaggagttggagaccatcctggccaacatggcgaaaaccgtctctactaaaaatacaaaaaatagccgggcatggtggtgcacgcctgttagcccatttactcaggaggctgaggcaggagaattgtttgaacctgggaggcggaggctgcagagagccaagatcacgccactgcactccagcctgagcaacagagtgagactctgtctcaaaaaaaaaaaaaaaaaaaggacacacaaggaattggcaccgggggttgtgtctgggaatgggggtgggagggagacatacttttctgcttgaatgtctgtgttacatattataatgtggtatcattataatgcgtcaccacgcgcaggtccatgaatgaatgcggaagtcagtcgtcacccgggagctccctgggcatgtggactcctgggctgcagccccaaagggaggaagcagcagggctatgggtggcaggggccaggatgagctcctgggtgattctgtcacaggtggccctggaccacacttaggaacaaaatcgccagctgggtcctcttcccaccggccacccagccaggctcatttgcatgatcttttgcatatatttgcatgacttccctggttccaaataaagcctgttagtccttatcctcacttctgctgggtgctgagcaaagcttcttccctcccgccctcccctagcactgcccccgcccagacctggctggcctggactaaccccgtccttctcacctcctagccccagtcaaatatgtcatcctttgaccccatctccactttctcctagtcccccaaggcctggcacacacacatcacctcccccaccccagagccgaaagcctgttctcagtcccacactcgttttttttttttgtttgttttgctttgtttttgagacagggtctcactctgttgtgcaggttacagtgtagtggtgtgatctcagttcactgtaacctctgcctccagggctcaagcgatcgtcccacctcagcctcccaaatagctgggacgacaggccctcgccaccacacctggctaatttttgtattttttgtagaagcaaggtttcgctatgttgctgaggctggtctcaaactcctggactcaagtgatctgcccgccttggcctcccaaagtgctggattacaggagtgagataccatgcccagcccagtctcataatctttagcccctcttctgaactcccaaaacactggtcccctcttttttttttttttttttgagatggagtttcattcttgttgcctaggctagagtgcagtagtgcagtctcggctcactgcaacctccacctcccgggttcaaaggatcctcctgcctcagcctccggagtatctgggattacaggcacgtgccaccatgcctggctaattcgtatttttagtagtgacggggtttcgccacgttgaccaggctggtcttgaactcctgaactcaggtgatccgcctgccttggcctcccaaagtgttgggattacaggcgtgagccactgcatccggcccggtccccctcttttcagtgcttctgtgtcctcctaaacatccactgagcacccagggctaaggcaggccccttgcccatctcattctccctaatcctccagggactctgtgagacaggactccactgggcccattttacagatgaagaaactgagcctcaggaaggtcccatcacttgccagaaagtggcggctctttccatcccaccagcctgcctctgcaaatggccccgtggcattttcgctcatctcaagtgaatgttatttgggttttgttttgcttcacttgctgtaattaggtctttgaaattatgcaagtcatatgcacttactgtaaaaacattaaaaccgctgggtgcggtggctcacgcctgtaatcccagcactctgggaggccgaggcgggtggatcacgaggtcaggagatcaagaccatcctggctaacacggtgaaatcccgtctctactaaaaaaatacaaaaaattatccgggcgtggcggtgggtgcctgtagtcccagctacacgggaggctgaggcaggagaatggtgtgaacccaggaggcggagcttgcagtgagccgagatcccgccactgcactccagcctgcgtgacagagctagattctgtctataaaaaaacaaaaacaaaaacaaaaaaaacacaacactaaaaccatccaggaatatttgggtaaaatataagtctcctccttgaatgcacctgtcccccaataacacttttttttttttttttttgagacagagtcttgttctgtggcccaggctggagtgcaatggcacgatctcggttctctgcaaactccgcctcctgggttcaagcgattctcctctctcagcctcctgagtagctgagattacaggcacccgccaccacccctggctaatttttgtatttttagtagagatggggtttcaccatgttggtcaggctggtctcaaactcctgatctcgtgatccgtccaccttggccttcctaagtgctgggatgacaggcgtgagccaccgcgtccggcctcccaataacactttctaggaagagccacagtgaacagtctggggtctccttccagaactattgacctacagacatgatatattcaaatatatagacataatttttattgtaagatatacatgcaaaagacatacaattttaaaaaaatagagataccatgtactcatcacccataaaaactgctaacacctgaattatacccctgtatgtctctatgcctgcacctcctcttttctctctatttatttctgagacagaatttcattcttgttgcccagactggagtgcaatggcgtgatctcagctcactgcaacctccgcctcccgggttcaagcaattctcctgcctcagcctcccaagtagctgggaatacaggtgcccgccaccacgcctggctaattttttgtatttttagtagagatagggtttcaccatgttggtcaggctggtctccaactcctgatctcaggtgatccacccgcctcagcctctcaaagtgctgggattataggtgtgagccaccatgcccagctgtatttctcttttttcttactattagccacatatatgttccttaagtaataagtgtaagatgagaattgctcaattattgtgtgtgcaacatgttcaactttattaggcaaggctaaactatttttgcaggagattgaaccagttcatactcccgcccaaagcagatgagagtcctcactgattcatttccttgccaaatctgaaaccgttcaatttcataatatctgccaagccagtgagagtaaaatcccaacccactgcggctttaatttacatttcccttattactaatgatattgaatatctgtcttgtttatatcttctttttttttttttctttgatggagtttcgctcttgttgcccaggctggagtgcaatggcatgatctcagctcaccacaacctccgcctcccgggttcaaactattctcctacctcagcctcccaggtagctgggattataggcatgcactaccatgccggttaattttgtatttttagtagagacagggtttctccatgttggccaggctggtcttgaactccccacctcaggtgatccgcatgcctcagcctcccaaagtgttaggattacaggcgtgagtcaccacacctggcccctgtttatattttctatatccttagtgattctttcatctttttgatgtgtcagtcactgaatgtttgtcataaaatctctaattatattggcaccagcattatcgaaagaaaggaaaaaaaactctgtttagaataatggatttgttagcttctccttgatttgctttatatagtttgaggttgtgttatcaggtgtataagagttcagaattgtttttatcttcctggagttatatactccttctttgtttctaataatacttttgccttgaagcctagtttgtctgttattaatacaatgaaaaatcttttggttttaatctttttttttttttgagatggagtttcgctcttgttgcctgggctggagtgcagtggcgcgatctcagctcaccgcaacctctgcctcccgggttcaagcgattctcctgcctcagcctcccaagtagctgagattacaggcatgcgccaccacacccagctaattttgtatttttttagtagagacggggcttctctgtgttggtcaggctggtctcaaactcctgacctcaggtgatctgcctgcctcagcctcccaaagtgctgggattacaggcgtgagccactgcgcccggccctcacctcggcctttcaaagggctgggattacaaacgtgagccaccgtgcctggcctcaatgtctcttaaatctcattcaatctataggttcctactctatctcttctattttccttgcaatttgttagttggggaaaccaggtcatttgtccttcatataaaatattttgtttaatgaaattatatagataatgatctttagaaatacatcttggatataacaagtgttggagaggacgtgaagaaaagggaatccttgcatatggttggtgggaatgtaaattagtatagccattatggaaaacagtatggaggttcctcaaaaacaaaataaaaatagaactaccatatgatccagcaatcccactactgggtgtgtatccaaaggaaatgaaatcagtatgtcaaaaagacatctgcaccccatgctcattgcagttttattcacaatagccaagctgtggaaacaactgaaaatgtccatcggtggatgaatggatcaaggaaatgtggtatatatacaccatggaatactattcagcctaaaaaaagagacagtcctgtcactgtcagcaccgtgaacgaacctagaggacattatgttaagcgcaataacacaggcacagaaagacaagtacgcgtgatttcacttaaactatggaatctaaacaagttgaactcagccgggcacagtggctctcacctgtaatcccagcactttgggaggccgaggcaggcagatcacctgaggtcaggagtttgagaccagcctgaccaacatggagaaaccctgtctctaccaaaaatacaaaaaattagctgggtgtggtggtgcacgcctgtaatcccagctactcaggaggctgaggcgggagaatcacttgaacccgggaggcagaggttgcagtgagccgagatggcgccattgcactccagcctgggtaacaagagcgaaactccgtctcaaaaaaaaaagttggactcacagaagcagagaggagaacggtggttgtgctgaggctggcagagggagtgggggtgttgggagatgttggtcaaaggatacaaaatttcagttagatgggaggaataagtacaagagatccattgtacatggtgaccacagttaataacaatgtattgtattcttgaaaattgctgagagtacattttaagtgttctcaccataaaacaataagtatgtggtgacacctacattacttagcttgatttagccattccacagtgcatacataattcaaaacaacatgttgtgtacaataactacaatttttatgttaatttttaaaataaaaaattttaatgattttaaaaataagtatataaaatatattttattttattattatactatatgttaatttccttgtgtatatatagctctcaaactctggagctcaagcagtcctcctcctcaacctaaagtactgggattacaggcctgagccactgcacctggcctacagttattattattattattattatttcttttttcagtatttattgatcattcttgggtgtttctcgcagagggggatttggcagggtcataggacaatagtggagggaaggtcagcagataaacatgtgaacaagggtctctggttttcctagacagaggaccctttggccttccgcagtgtttgtgtccctgggtacttgagattagggagtggtgatgactcttaacgagcatgctgccttcaagcatctgtttaacaaagcacatcgtgcaccgcccttaatccatttaaccctgagtggacacagcacatgtttcagagagcacggggttgggggtaaggttatagatcaacagcatcccaaggcagaagaatttttcttagtacagaacaaaatggagtctcccatgtctacttctttctacacagacacagtaacaatctgatctctctttcttttccccacatttcccccttttctattcgacaaaaccgccatcgtcatcatggcccgttctcaatgagctgttgggtacacctcccagacgcggtggcggccgggcagaggggctcctcacttcccagacggggcggccgggcagaggcgcccctcacctcccaaacggggcagtggccgggcggaggcgccccccacctccctcccggacggggcggctggccggacgggggctgaccccccacctccctcccggacggggcggctgccgggcagagacgctcctcacctcccagatggggtggcagtcgggcagagacactcctcagttcccagacggggtcgcggccgggcagaggcgctcctcacatcccagacggggcagcggggcagaggagctcctcacatcccacacaatgggcggccaggcagagacgctcctcacttcccagacggggtggcggccgggcagaggctgcaatctcggcactttgggaggccaaggcaggcggctgggaggtggaggttgtagcgagccgagatcacgccactgcactccagcctgggcaacattgagcactgagtgagcgagactccgtctgcaatcccggcacctcgggaggccgaggcaggcagatcactcgcggtcaggagctggagaccagcccggccaacgcggtgaaaccccgtctccaccaaaaaatgcaaaaaccagtcaggtgtggcagcgcgtgcctgcaatcccaggcactctgcaggctgaggcaggagaatcaggcagggaggttgcagtgagccgagatggcggcagtacagtccagcctcggctttcacaactttggtggcatcagagggagaccggggagaaggggagggggagggagagggaccagttattattttttaaaatgtcttctcggccaagcacggtggctcaagtctgtaatcccagcactttgggaggccgagacaggtggattgcttgagccttgggagtttgagaccagcctgggcaacatagcaagactctgtctctacaaaaaaatacaaaaattaactgtgtgtggtggtgtgtgcctgcagtcccagctactctggaggctgaggtgggaggatcatctgagcccagggaggttgaggctgcagtgagccgtgattggacaactgcactctggtctgggtgacagagtgagacccagtctcaaaaaaaaaaaaaaaagtcttctctcccctacttacctactatgagtatagatgaggcaatttacttgacaaatatttaatgagcaccccactatgtgctgggccccatgccagatcctgagaaatataacggtgaacaggcccgacatattcctggagcttcaatctgagatttggtagtttgcagaatcctgaagagagcttattaaaatgcaggtcccaggacccatctcacacaggatgtcaggggtgtgaggtggggaccaggagtgggcaccttttgccaattgagtctagccctgtcctacaatatgtaagccacaaaatgatccacatcacatcaatttaaattttccagcaattacattaaaaagtaaaaagaaggccgggcatggtggctcggctcacgcctgtaatcccagcactttgggaggctgaggcaggcagatcacctgaggtcgggagttcgagaccagcctgaccaacatggagaaaccctgtctctactaaaaatacaaaaattagctggacgtggtggtgcatgcctgtaatcccagctactcgggaggctgaagcaggagaatcacttgaacccgggaggcagaagttgcagtgagcgctattgcactccagcctgggcaataagagagaaactccgtctcaaaaaaaaaaaaaaaaaaaaagtaaaaagaaggctagacacggaggctcatgcctgtaatcccagcacttcgggaggtcaaggcaggaggatcgcttgaggccaggagttggagactagcctggccaacatggtgaaactcgtctctactaaaaatacaaaaaattagccaggcgtggtggtgggtgcctgtaatcccagctactcaggaggctgagggaggagaatggcttgaacctgggaggccgaggttgcagtgagcagagatcgcgccactgcactccagcctgggctacagagagacttcatctaaaacaaaaaacaaaaaacaaaaaacgataatttaaagatagtttgcaatctttctttctttctctttttttttttttttttttgaggcagtctcgctctgttgccaggctggagtgcaatggcgcgatcttgggtcactgcaacctccgcctcccgggttcaagcgattctcctgcctcaggctcccaagtagctgagattacaggcgcccgccactgcgcccggctaatttttgtattttagtagagacggggtttcactatgttggtcaggctggtctcgaactcctgacctcaggtgatccgcccacctcagcctcccaaagtgctgagattacaggcgtgagccaccacgcccggcctgcaatctttcttactacaaagtctttgaaatccggtgtgtatcttacattcacagcacacctcagttacaccagccacatttcaagtgcgcagtgtgactcggggctactgtgttggacagcgcagcccggaggctgatccgggtagcccgggggccacgctgggagcagcgcagggctggatcgtgtctgtgaaactcactttgcagactccggtgctccaaacaaaatgagggaacaaagtcatacccggactccaattctgcctcccactcctggctgtctgccccaaggtccttccgccccgtcctggccacgtgaccttgggagtcccttcgcctccagagccttgacctgtacacctgagaaatgggcgtggtgactcctgctggcagcagcagtggtgcgcgtggggacacgcgtgcggggagtcaggcgcccccgggtgctcgcggcaggaaggagtgaagcctgcgggcgggtgtgggggcaagaactgaagccgggggaaccagacgggctccgggtgcgggggctccgctggggccacgccagtccgcctgcagcagccggcagctccggaggcggccaccgggcggcgctgtggagcagggaccccggggcccgcaggggcccgcggaggagtgagaataattagtaacagcccctgtctggggtgcacttcccgggggaggggagaatgaggtcactctggtccttctgtgacaggagggaaaacaggcgaagaagcccatccccccaaccaaccccccctaattcaagtcggccaacactgcggccatgggaggatccgggtttggagtcgggggctctgggtgaggtcctgattctgacctctgagggacctcgggctgctcggcctggtctcccacctgtagacggggacacctgtgcctccctgcagatgccggctgcaaaggggcgttgccaactgtctggtgccgagccagagtcagtgcgtgcctgggattgagaggcgaactttgagagatgaggataaaaataacagctgccgatgctgagctaaatgcctactcttctttatactctcttaacagccggtgaggttggtatgactgttgcccccatctgacagatggggtagctgggcctccaaggtctggtgtggccttacctggcccagcagagcgggaccctgattccagggttctgtgctgccttgtgaccagaccttggcttagacgggttcggatgaaccttctcctgcacacacccccacccatggctttttcctccctcccctcctgggctctcagaccctctggccttccctcccctccccaaaggctgccagggcccacagccaggacccccagtctccccattaagatcagaagcctctccatgcccacagctcaggcctagccagtgagagtggtcctctggccgtaatagtggtttcaagacaggcatgggactcaagcctggccagtgtggctggatgttgggactctggcacctagagcagttgggaaacctgcctggaggcctaggggctgggagcctggagcccggaggccttgggagatttgcttgagtcttgtcttcaccttctattttgtatttttctagagagacagggtctcactatgttgtccaggttggtgggcagtggctattcacggggcaatcagactcgaactcctggctcaagccatccttccacctcagcctcctgagtagctgggactacaggtgtgcaccactgcgccccacttggcttcccctttaatggaggagctgctgactatggtcttgtgctctggaatgcagccaaagcacctccagctttccacctgcccgcaaccccagttctgtgcccacagtctgcctcccaccctcccgtccatctgcaccccgtccccacattgactcaccaaatctagagtctgatcattggagggtccctcgcaaccccttgcctcctccagaaagaaaggcttggctccactctcttttttattttttgagatggagtctcgctctgtctcccaggctggagtgcagtggcgcgatctcagctcactgcaggctctgcctcccaggttcacaccattctcctgcctcaacctcccgagtagctgggactataggcacccgccaccacgcccggctaattttttgtatttttagtagagacaacgtttcaccatgttagacaggatggtctcgatctcctgaccttgtgatctgcctcccaaagtgctgggattacaaacctgaaccaccatgcccggcctgcctttgttttttatctgtaaaatgtggcaaagggctgaaagccccctagctcctctggaagccagaaacaccctgcccgatgatggcagccccctttttaatttaatttatttattttgagatggtgtctcattctgtcgcccaggctggagtgcaatggagtaatctcagctcactgcaacctctgcctcttggattcaagtgattcttgtgcctcagccttctgagtagctgggattacaggtgcccgccaccacgcccagctaagttttgtatttttagtagagacagtgtttgaggccaggctggtctcaaacacctgaccttaggtgatccgcttgccttagcctcccaaagtgctatgggattacaggtgtaagccaccatgcccggcccagccccctcttttataaggggactttgtatatgctgtccctctgcttggacgtccttccttagtgtccctagagggggtaagagcatgactggacgcaggcaatctgcaatccagtcccagctggagacaacaaagggcgctctgggctgggggcactgcaggtgcgaggcctctggagcgggaaggcataggtagctcggggggaaggttctgtggggttggacgaatatattttatggctcaagttctaattcagcagccctgtctccctcctgcccctgggagaacttctgctttccctggaatggggctgtggaaggacagactggtccgtgggtccgggtgacctaatttgaataatgcgaacgggaatgctgagattctgatatgcacgatggtcttggggcctatgggtcggggggaatgaagaccctggattggaattggaattggaacccaaccaggaggaacaggcagcccaggggtttggtggagggttttgggtgacagggacgttaccaggaggcaggagaggcccaagcacaccacttggcagtgcctggcagagcagggcagggcgcgggagggcgggtgacagtggctggtacaggtttcagcagtgaacacctcccgctgcactctgggcctccccatggaggagctggaagctaaaataggactctattttgggggcctgaggcgaactggagtcacttccctgccagaagtgagaagttgcttcagcctctaccagggcaggccctcccctatgccggagtggcagggggtgggccttatgggtgcggcctgaggcagagggtgcgggccaaggagtgggagaggaccgtggctgctgaggggctgaggggctgggggcctggcccacagacatcatctccctccgtcctcagggcagcggtgtgaggtgggagctggggcttccccatgttacagatgaggctcagagaggccaagtcacctctccaaggtcaatcagtagcaaggggcagagccaggatttggccaggtctggatgacgcctgagatgtaatcccaaccccagcagtgggcgtgagcgggacctccacaggcagaaggagcagctgtttcctgaccacctgccgggtgcctggccctctgcacgcgcgatggctcagtgaggccctgtgtcccgccccacaggaggctgcagcctcgccccttctcacagacaggcctgaagccaagaaggcaggcctgggaagctccagcctcaggtgagcgtctgagttactgcccaaacgcaggcaaacccctttcctgtctgggcctcagtgtccccatccgtacttccaggagatcgggccacagtcccaaaagacccatccaacttttctttttttttttttttttgagatggggccgctcgctctgtcacccaggctggagtgcagtagcgcgatcttggctcactgcaacctctgcctcccaggctcaagcgattctcttgcctcagcctcccaagtagctgggattacaggcgcccaccaccatgcccagctaatttttgtatttttagtagagacaggatttcaccatgttggccaggctggtctcaaactcctgacctaaggtgattcacccgcctcggtggcccaaagtgctgggattacaggcgtgagtgagccaccgtgcctggccaaggcccatccaactctgatgtttataacatgtcccacggggaggctggcagagagctgggctgggaggcagctgcaatgacccggggctttcgaagcctgccttccccagcaaacccattctccaggtctctcagtgaggcccacctgcggccgggggaagaggaggagtgtctttcctgatgcagaccccgctccatgctgcagtggatccacgtgcacgatgccatgtagttgcaggttgtcacccctgtgagagagggactgttgttatggcctcttttttatagttgaagcccagggccaggaagtccctgggcccaggaccacccgagagggaggtcatggttgggcccctcacccaggctgcgggctccaggccccacccttctgccgccaccttcatgatgccacaaagtcgaagtctgatttcattacccccctgaccccaagctggtctttggctgccaggaggtggcaaggccatttgcggccccctccgcacccagtccttccctgcagtgactgggctgtgaatagcctggcccatcctctccacggccccacctttgccgtccccatgctcaattgcccatatcctccctcctctcacctgccatttcccagtcattccattgtctcgcgctctcctgcccactgaggtgcctctggcagcttcccaggtcctccctgactggttttggaaccccaaaagtggcccccctattcctgctgccccattcaatgtcccacagcagccccagacacctggagactggcagaggctgcgagaaggctggccccgtccaggctgccactctgcccacccgggcctgctggcttcccatccctgcccagcccctgctccaggccactcagctgccacgtgcagctcctgaatgccacctccgtcacccactcctctgctcccagcctgcccagagctccccactgcctacaggaaaaggtcccaggtcattagtgtgtcgtcctcacctgctcacctggcccagcccccagtacggccccacccatgccatgcaccccccttcagcctcactcgcctccccgccaacctctgccagggtacagaggctgaagagtcttcaaccttaaggccagaaagccttgggcaagacgtgtcacccctcagagcctcctcatctgtacaatgggggaatcacagaacccccctcacagggcagatggggggtgtcaaatgggaaatcagagagtaaggggctccatcacctggaaagtgcaccattcactgtgacccttaccgtaggggattgctcagattcccctccagcggtgataagagactgggggtgggcctgacagggtaggagtcaggggcggtggaggagatctcacagccaggacagagtcgccgcctgctccagcccacagggcagacatcggggtccccatctgcagagaagaagataggaggcttggggcacacagctgccaagcggaactggcattggcaacaggcctgtcctttgcccccaacacgcacgcagcggggcttctctgtcccctccagcctctgggttttcttcatctcctttttttttttttttttttttttgagatggagtctcactgtgttgcccaggctggagtgcagtggtgccatcttggctcactgcaacctctgcctcccaggttcaagcaattcttctgccttagcctcccaagtagctggaattatagccaccacacctggctaattttttgtatttttagtacagacggggtttcaccatgttggccaggctggtttcaaactcctgacctcaggtgatccacccacctcggcctcccaaagtgctgggattacaggtgtgagccaccgtgcctggccttcatctccccgatttgggttccagccgctgctgtagttgctgggctgtcttggtctctgtatctccttagcctcctctggcttttccgtgcagctcccgcaccgctcagcgcccccggccttctcccggggccatcccttctttggccctagctccttttctctaatgcccaccttcctctctgcctggctgcatgcgggcctagggttttgccatcctggggtccctgagcacccagctgcttccccacagacatgccagtccttgtagtgggtgggaggctgtcacttcccctccgtctgtgccccgacacctgttgctgtccacctgtgactcagtgtggtgtctccggacccacaagccggtgcctcctctgctggagctccgcttgatctgttttgcgttctcttctgcctccctcgggctcactcttggcccctgggcctcagtaggcctccctctctcagcccttgtctctctgtcattttttgtctctgactctctcagtgtctctttctgtgtttctcctctctctccccatctctgtcacaacctatccctgtcacctcctcccacatcagtgtgtaatatcccttccatcctcacagctctgtcgcctctccctgaacccttcccgcctgtgtgcactcacccttaggccctgcaccaggtgtagacagaggccccggggggaggtgaggcaggaggggctcagacaggcctgggggacgttccagggatagcaaggggaggacagtgagctgagcctctgccctgcttagcaggagccccaggaggccagaggggcaggtgctggcctccagaccctcatcccaaggggccacatcccagaaggtaaccctggtgacaggcggagggtcaggagcctggctctggatagggctctgtggctgttcctctgtgtgatgtcgctaattcccccaccctcccctctcttcctctgaactggggacaaccaaaggtctcttcttggcctccttctcactgtgggcactgtgagagcggaaagcaacctccacccagcaggggctctggcttacttgccccattatcaaagcccctgcaaccgcagtggacggctccagcgaccatgaccaagaagccctggctgctgtcccaagcctgagcaggtagcggcaggggtttgcccatggtcccacctggcgtcggtggcagggcccaggccagaggccggcttcaggactctcagcacagggctgaagggtggggtcccagctacatctttgtcggtttggttcagtgctgaacggtttctgctaaaacaggccttccttactcacagaaggtgctcaacgggttttcatcgcgtgaccttgagacgccctttagaatctgtggtgggtggggccggcgtgtgagctgagggccaggatccaggcacttgcttctggctgtgtgggaaggttctgccaggttccaggcagcaagtggagtgaggggtggccagtgattgggggaggggcaaagctaggcttggccaattttgctaagtgcctatctctgtctgtcctcacctctcccccagacctcctgccagcttctgaaggccaaaggaacaaaatcctaggtggtcaggcacatcaggaccctggaggtcatcaggtcccagctccttttttttttttttttgagaccgagtctcactctgttgcccaggctggagtgcagtggcatgatctcagctcactgcaacctccgcctcccgggttcaagtgattctcgtgtctcaacctcctgagtagctgggactgcaggtgttcaccaccatgcctggctaatttttgtatttttagtagagatggggttttaccatgttgatcaggctggtctcgagctcctgacctaaggtgatccacccaccttgggatcaaagtgctgggattacaggcgtgagccactgcacctggcctagctcctaactttgaagatggggaaaatgaggcccaggaaagagaagagaacacccaagatcacacagtggtcaaacccaagctctctctctagccttccagttttcatagactgagagcaaagtaaccatcaggtgtccctttttccatggctgccaggtagctcagaggtccattttcaaattgtgtgtcttatattgtaagccaatccaaatcccttccagaaggcaattcgtatttatttaggtccagtaatgtacctgacaccatgccatgcctggtcacatatgggatctcatttaacgcacacagcaagcatgtgagatagatatgaatggctctttcagataaggaaacaggctcagagacatcaattaacttgcccaaagttgcacagctagtaagtggtaaaggcaggattcaaatctaggaccctctggctctgatacccgtgatctttcctctctgtgaataggcacatagaggccagtgctctcggccccatgccctggtctcattattgtgcccattgcctgccattcttcctcatcttcattcactctcttgactaggagcccctttcgtggctgtgaaggggaatattggttatttatttatttatttttgagacagaatctcactctgtcacacaggctggagtgcagtggcatgatctcagttctttgcaacctctgcctcccgggttcaagcaattctctgcctcagcctcctgagtagctgggattacaagcccacgccaccacgcccggctaatttttgtattttcagtagagaaagggtttcgccatgttggccaggctggtcttgaactcctgaccttgtgattcacacacctcggcctcccaaagtgctgggattataggcatgagccaccgtgcctggccaggatattggatttaaagctccttcgctttccaattcctgggacccaggtctacatcgtccttgtaggaagattcaaaggctgaagggtgcatttctacagcctgccagacagagcccagaattctgttagcttttgaaccttgtactcagcttatgcaaacaggcacaagaagaaaaaatagtgaacaaagatgttcatcactgcgttgctccaggtctcagtttctctatctgtaaatgaggggttgccttgatgatccataatggtgtataatttttgatcttctataatttgatgaacattctatagtcattaaaaattgaaggccgggcgcagtggctcacatctgtaatcccagcactttgggaggctgagggcggatcacaaggtcaggagttccagactggcctcgccaacataaccccgtctctactaaaaatacaaaaaattatccaggcatggtggtgcacacctgtaatcccaactactcgggaggctgaggcaggagaatctattttttttttttttttttttttgagatggtgtttcactcttgttgcccaggctggagtacaatggcatgatctcggctcacttcaacctctgcccccccgggttcaagcgattctcctgcctcagcctcccaagtagctgggattacaggcatgtgccaccatgcctggctaattttgtatttttagtagagacagggtttctccatgttggtcaggctggtctcgaactcccaacctcaggtgatctgcccaccttggcctcccaaagtgctgggattacaggtgtgagccaccacgcctggccaggagaatctcttgaacccagaaggcagaggttgtggtgagccgagattgcgccattgcactccagcctgggcaacacagcgagactccatctcaaaaaaaaaaaaaaaaaaattgaaaagatgtagaatccatcaatacccagaaaagtcaatacctggaaaaaactgcaatgagaaaagctagacgcaggaagcagtcatctgatcgcagccatgggctctaacaaagacaggggtgaacgcaatgaggtgaaatagctgagtcggatgcctcctaagttcttttctattcttctgtgagctatttgagttcataaggaagataaatcttccagaagctggtgggaaggaagccatggtgaatctacaaggattaggcctgaaccgtggaattccaggcaggcaggcaggtgtggccagatgagggcggggttttttgctcccattagatccgccctcttcccccctccctgtcttcctccctttcttcctcttcctccttccttgtcttcctccctttcttcctcttcctccctccctgtcttcctccttttcttccacatgcatgataccctcttcattctctccatcctgcccaccactcctgctccccaagaggctgtgaccgaagtggggaagagagggcagggcagggcagagggggtctccttaccctggctctgcagggaagctggtgtggcatgaggagggcttggcagcactttaaggccccttcagcctgcccgttggcacaattccaagctccgtgacatctaaggttcttacacccccagacgcagcaactccccccaccccgctccgtcagcgccgcaggagccggagtggagtgagggatcagaggagcggcacgaggagggaggcaggtgggagggctgtgaaaggggaacaggtgggagagggaaggtgagtcagccccgagcagagctgagccagcaggagtttgcagcgcagccaggcctgggagcctccctgcagctgcgggctttcggcaccgcgtggccccctcccccagtgcccacactggcactgccctttggcactccagaagtcctggctttgggctttcacttgcctcttctgtgtgaccctgccacaggtcaccttgcatgtgaccagagagaccaggcctctcccaaaagagcaactaccacaagcatatgagcaagctgcaagctggtgaagggcctggggggaccttggaacgccccatgttgctctggatggtggatgatgggccctcttgggggtaaccccacatgtaccccttccccaccctgcatccgggcctctcgcacatcttagaggagggtagacatcccctaagacgtgctctaggtggaggcttctgagtctgggagcacctgagcctgaatcctcttcagttactgctcgtagcccaggaagccgtggcatcctggggatgtggtgggaggagtggggagacctggcgagacccacccagggcctgcagggctggatagagggacatctctcatgagcctccagggtcaggattgagaccctggggtactcacctgacagaaggggaccaggggtccttccagaatgtgggcagatgcgccactgaatttccttcttgctgagcggcccccacaggctcttcggtgggggtgggggccaaaggccacaggtgcactctgggaaatctgggagggcacagaggaggaaaggaagcagcccctccccctcattgagcccccacctgggagaggatggagtgaaggagaagcaggctcccgggcctctgactgtcctcactttgtttccagccagccccctggttctctgggcctctatttatttcctcatcagtaaaaggaggccataatccttgtcctggcttcctcttggagtttcgtaagagttcaatgaacccaaggacgtgaaaggtgttatgcaaatgagagacattatgagttatctattgggaggcttggatcctgagcttggctctgtctccaggaaagaggcctcaagtttccttctgcagcagcgcagcatacggggtgcacagtgatccacccaaacggcagctatgctgccggggctggtgagacgtggtcattcacaaggcagctcgctgtgctgcacagcaggtaagcttgcctgctggttccctgtttctagaggcagctggcacctttgtgtggaagatccctgggacccagaagggtgccttctgcttcctttcagcctggggcacacagtcagcctgtagagtagaagtcgggtgggaggaaccctcaaactccaaggctctgggatagatgaccaactatggccacagctccctcctgctcggcatgtccttggcaatgtgactttgcctctttcccaaaaggtggaaactaatttcccaccctttgaatctgggctggcctcgtgacctggactctggccgatagactgcagtggaaatgatgttatccaagttcaaggggctaggcctccggagaccttgcagcttctacctttgccctcgtaggttgctgcccggagtcgccatgaaggaatgtgatgcagcctattggaggagaaccaaaccccaccaccaccccagaaagccataccagctgccgacatgtacatgggctcatcgggggttttccaggcccactgatgttccagctgagcacagctgccgggtaagcccaggagaaatcagctaggaaccccagcccacccacaggaccctaagagaggatgcgtcattggtctctgttttgtgctggctggttatagagcataggctaaccgaaggcagagaagggaagggacttacccgaggtcccacagagagcagagaccaagcctgtcttggttaagtctgtgaccaggtttcctggcccctgtgcccttcccatcagtgtcctgccgccagctctaccagcggtgtgtggatctgcatgtatgtagggaggtgcggatcgggtgggcccttcccacttccacctgagttaggaagggttggctgacgtccacacagggctgtcctgcccatcattgcaggcgggagggatggttaatcccattctgcagaggatgaaactgaggccaagagctgacagtcacacagctactaggtaacaaagctctgacatcaaagcttttggttctttgatgccaactccagatccttctattgactcgccggaaggagaatggcaggtggtaaagttccctccaagggtcagtcactcagaaagggccacatacacaggcacacacataacacacaggcacacacatgacacacaggcacacacacgacacacacaggcacaattacatgtgtgcttgctcactctctttctctccttctcacccctccatcttcaaccagcctacccctaatggaccatgtactttattaaaaatatatagttacggctgggtgcggtgactcacacttgtaatcccagcactttgggaggccaaggtgggtggatcacctgaggtcaggagttcgagaccagcctggccaacatggtgaaaccccatctttactaaaaatacaaaacttagctgagtatggtggctcatgcctgtaatctcagctactcaggaggctgaggcaggagaatcgctcgaacctgggaagcggaggttgcagtgagccgagattgctccattgcactccagcatgggcaacaagagcaaaactccgtctcaagaaaaaaaaataataataaaaaataaaaaaaaaatatatatatatatatatatatatggttacaaactctgttgtcaatctgggctgggcccggggctggagggactgcagggagggagggatggtccctcatcccacccctcagagtccctcctctgcacccaaacccaacaccatccaagggccaaggtggctggcgttgagggcctcaaggggccagccagctgggcaggggaaggcgctaggcttgatgggctgggtggggaggggtgcacagagagggactgcatctccctgtccagcaggtaaaaacggcagaaagtgaatttggtgtctccatctgtctccatttatagatatttacaaaagaaagtcatgagcaacaggccacagtcatgcaaaagaaacgcacccccccctccccaaactaaccccctgcccaccctgaaaccccgagatgtcccccgcccagcagtccagccaccttccccaaggttctgagagcaaagagggcacgtccttgaagagtcagtgggggaagggtggtggatccggggacctagagccaccagaagtaggcgctggcggaactcaggctgatcggggccgagctcttcccaggcctgggtgctggagtcaggaggaaggggtcccccagtctttgaaacccccaccttcctccagaaggtccacggagccagggttggctctgtcctgagtgtgggagggggtgtcctggcatcccacccccggcagaggctcttgtgggcagtggtgagggccgggcctggaggtcagatggcagactccctgcggtaggagatgttgtccagcgggagggaagcctgcatgcgctccaggtccaggtggctgccgaactccagcatccggatgatgcccgcctcctccttggaacccgcctccaggcccaggcctgcggccaccgcggccgccgcagctgcctcctcctccatctcctcttcctcctggctcataagggccagctcgttctcgtagcagaaggcactgggagggggcggtggggcgggcagcacggtgatcttactctcctgcagctcccgggccgagcagcagggcgtgccggccacctcgtaggtcttgtgaaaacgtgagtagtccaccttgtagtggctcttctcctcgaagaccacaggctcaaagcggtggccccacaggatctcgctggccaggtaggagctgcgggcctgggtggtcatggccgtggcctccaccatgccctccaggatgaccacgatctcaaagtcctccgactccagctcctccttgcccatgccataaagcgggctgtcctcgtcgatctcgtggacaatgatgatgggcgacaccaggaagatgcggtccaggccgatgtcatagcccacgttgaggtcccgctggtccaggggcaggtactcgccctcctgggtcatgtagggcttgatgagctgggcccgcacgtgggcctccacaatgtggctcttgcgcaggttgcccacgcgccacatgaggcagagcttgccgtcgcgcaccgaaatgaccgcgtggtggctgaacagcaacgtctgcgcccgcttcttgggccgcgccatcttggccatgatggtgccaatcatgaaggagtcgatgacgcagcccacgatggactggaccaccacagcgatgactgccagcgggcactcctctgtcacgcaccggaacccatagccgatggtcgtctgcgtctccaccgagaacaggaaggcacccaggaagccgttcacgtgcatgatgcagggcttgggggccaccggggctgctccgccaccacccgccgccgggccccccgccgcaggcacccctgggctggcctccaggtcaccgtggaagaaggcgatacaccagaagaggaggccgaaaaagagccaggagacaaggaaggccgcggagaagatcatgagcatgtagcgccagcgcgtgtccacgcaggtggtgaagatgtccgccatgtagcgctgcgacttgttgctcaggttggcgaagtacacgttgcattggccgttcttcttgacgaagcggttgcggcgcttccgccggggcacgtgggcctggccgttgcggctgtgtccgtgcatgtcctgaagccggcgtggtcacctgggaagacgcagggcctgcggaggagaagccggacaggtgagatgctggggagcgaggggctccctcggggccactcagactcagccccaagactctcagaagcaggtgagcctggaccaggacctaagacttcctctgccccggcaggcggagggtggcagcagaggtggctctgatgacagggtctgagccagtgccacccagtccggcccagcttagagactggggtccatagaccaggaagctaaagccacaaggatccaggtcctagtccctgcccctcaacactgcccctccggccctcctatgctcactgttctggaagcttcctgatgcccatcttggttcctccctgtccctctgtcctgcttgccctgagcatagggagccacggaggcgctaagcccgcttccctccctggattccatctctgcacttttgggcttctcgggggctggacatcctcctgtgcactagccactggccacgtgtggctctttacatttaattaaaacgaaataaaatattaactgcagctccttccttgcatgagccacatttcaagtgatcaggagccacatgtggtcaacggccaccacactggacagagaagacacaggagagttctatcactgagaaatttctggctgggcacaggggctcatgcctgtgatctcagcattttaggaggccgagatgcaaagattgtttgtgccaggagtttgagaccagcctgggcaacagagtgagaccccatctctacaaaaaataagaaaattagccaggcatggtggtgcatgcctctggtaccagctactcaggaggctaaggcaggaggatctattgagcccagggggtcaaggctgcagtgagctgtgatcatgccactgaactccaacctgggtcacagagcaagaccccatgtcaaaaaaaaaaaaaaaaaaaaaaagaaagaaaaagttctactgggacccgcagccccacctgggtctgagctcctttcttaaactcttctctcccagtgttgctttgagtccttgagcccaaattcctgcccagtgcccacacttgttaggagcagtggtgaggggagaatccaatgtgacagtcagggtggaggaagggggagcccccagctctgactcctctgtagacatcgctattcccatgtcccaggtggctcagagatggaaagccacctgccagccacaaagctggcagtggatacaaacttgcgtggcaccaacatgaatgagttgatggcggggagacagggagtgggaggggaggacacacctcgggcaattcagttcacctctcagagcctccatgtcttcatgtaacatgggcaccaaaactccctacctcatgggacctacggggacagcaggtgctggggtaaagccatcaccctcctgccttccttcccacacttcccaggagctggtgacaggcaggatttgcctgtcaagcatccccagctgttgcagcagaagaggcccctcaccccactgggtggcgggatgcgcctcgggcccgtagaggacagaccttctctccacccctctctgccattgcgtccccagggaagacatgctgctgccccaggccccagcagctggcagggccaggactgggcctgggttcccaataacattttggcccagaattacataaggctggaagtttctattttctgttctattcttcttcctgatctaattgtgcatctgtggcaatgtttatacacttccccggttcaggacaactcggttgccgcagcaaccggtacgcgccaacgctataatttagagatcaacagcctcagagcctgcctcttcccaagagaaactccctctccgggcccagggagagtgagccctgcccccacctcctcccccgcggtcacccaccctgactccgagttcttctccctattcccctggttctcaaagagctccctggctcctacagtcctgggttgaagtcctagatccactgtgtgacttgggcgagctgttgactactctgaacctcagtttcctcatcttgaaaatggggctgactgggtgcggtggctcacgcctgtaatcccagcactttgggaggccgaggcgggtggatcacctgaggttgggagtttgagaccagcctgaccaacatgaagaaaccccgtctctactgaaaatacaaaaattaggccgggcatggtggcgtgtgcctgtaatcccagctactggggggctgaggcaggaggatcgcttgaacctgggaggcagaggttgcagtgagccgagatcgtgccactgcactccagcctgggcaacaaagtgagacttcgtctcgaaaaaaaaagaaaatgagaaaattgggccaatgagatatcatgctggagacccgacaggtcatgcaggcacggcctctaacgtaatgctggcccttcagagctgggaggcccagaccctctttgccccctcccgcagcatcccagcagccagggctccaggagaaaggcttggggttctggggccaggcacaccttctgctctgtaaatagagttttcagggaggcctttctttgctaaatgtattccccctgttctgtcccactgcctgaaatggctccaggggcaccgcggactgtcaggacaggaggagcatagggtcaccgagttcaggaccctcattttatatcggagaccaaggacatccagagataggaaggacttgctaagagtcccagagtggagccaggtgggccagccctgaacaaggcctcacccccaccccagagctcctcatccacttcctccctgcagggggctggagtgggttttggggcaagggaagagaagaaaccagccagtccaaactggaccaccatccacaggtgtgcaggatagaggcagaggggacagggtgtggcggcccaggccttcaacgggtgaggtcactgagctccagagaaggtggggggccctgcccaaggccaaacacaagcccagggttccaggggatccctggttctctgcccggtgggattgcctcctgacatggcgagttcacctggtgctgcagacgagatctcttcctggacttccccacctctggaggggccttgggggtaagggagccgatcccctgatggctacagagattgggcatcccctcgccagcagtgcccactcctccccattatcgagtgcccagggtcaattctgagcttccacaatcctcagccccagcggcaacactcactccccaggcccaccagcccactggcctccacagtgcagcccgatggggacatggtttacccctcaccccggtgcctccccgacagcccacagcaggtgtcctgagcccttgctatgtgctgggccctgtcttgggttcccagtgcccccagcacatcctggagcttagcaggaaagctgcttccctggcacttctcagacctccacccttccccatggagcagcctctgtgacatcccatccccctgaaaacccttggtctgcagtgacttgctcaaataagagcacgctgctgccaccacagaccattttagcaggagagagaggttcagctgctaattcgaggctgacccgtgcaaggcctggccaaaaagtgaagggtatgagcttggcattgtgttctcatgtgacaaccaccaggagatggccagattttctcttccttgtcacatggggcttcccagggaaggctgacgatggcaggagagggtcaaaaggccttgacaattcagtaccatcctcctctgactagagatgtttttttttttttaaagggccctgctgggctaggtgactcacgcctgtaatcccaacacttttggaggctgaagcgggcggatcacaaggtcaggagttcaagaccagcctggccaacttggtgaaagcctgtctctactaaaaattcaaaaaaattagctgggcatggtggcgggcgcctgtaatcccagctactagggaggctgaggcagaaggattgcttgaacctgggaggcagaggttgcagtgagccaagattgagtgaccgcactctagactgggtgacacagagagactccatctcaaaataaataaataaataaataaataaataaaataaaataaaataaaataaaaaagacccctggttgtttaggtgtctgctttatccctatgattaaaccacttttgtggatgcagggatgcagggcctaatttgcttgcatggaatgtgcactagaagaatgcagtttgaggcttgttttctgcgatggaggccctgggaggtggagaggccctctgtcacagccctggtatgtgaccttgaacaagttcttcctctccctggcatcaggtcctcctccaattaagggactactcatcctccccaacttttttgaaggtcacagagcttgacatagaaccagagggattggtgaaatggggcctgaggtttccaaaacccccagtgcaggccactagcccatggcaaaatgagcctaagaaggatcaatgggccgggcgcggtggctcacgcctgtaaccccagaactttgggaggcagaggcaggcggatctcttgaggccaggagttcaagaccagcctgagcaacatggcaaaaccccatctctacaaaaaatacaaaaaaattagccgggcatgatggtgcacgcctgtaatcccagcttctcgggaggctgaggcatgagaatcgcttgaacccagcaggcagaggttgcagtcagccgagatcacaccactgcactccagcctgggcaacagagcaagactccatctcaaaaaaaagatcaatggtactgctgtcctttatatcctgggactctttcagtggcaaacatttttttagaaagtgatggacataggagatgctgactgctttttaaatgttaatgtcttttcttggcaaaatgaagaagtgacaatgctacaccagttaccagacttttcttttaatttttaaaaatttattattggccgggtgcggtggctcacgcctgtaatcccagcactttgggaggccaaggcgggcggatgacctgaggtcaggagtttgagaccagcctgaccaacatggagaaaactgtttctactaaaaatacaaaactagccaggtgtggtggtgtgtgcctgtaaccccagctactcgggaggctgaggcaggagaatcacttgaacctgggaggcggaggttgcagtgagccgagatcgtgtcattgcactccagcctgggcaacaagagtgaaactccgtctcaaaaaataaataaataaaaataaacacaaaaattgattattactattttttatagagatggggtcttactatgtttcctaggctggtctcaaactcctggtctcaagctatcctcctgcctcggtctcccaaaatgctgggatcacaggcacgagccactgcatccggctttctcttaattttactgtgctgtaaacatccaaaatctgcaagtctttagtccagacttcattagccagctggggaaaccgaggccaagaacagggcatggcaccgtgtccgaggtggcacagtaagtcaacagctgtggaaggaagctcaggcctcaccactgacaccagccatcctgccccatcctgaggaattagggaggggctggagactctgcctcctgggggtccagaggaggcaggaagaccaccccaaccctgtcaacttttaggttttcccgacaattttaggacactaacttatctgtccttgcccacaactccctttgcaaaagaaaagctgatcagcttgcagcagcctcggcaggtcccagctacctggaaggcttcgagggcaaatctcctccccgagatccgtgccactgaccagagacaccatggccactgcaggggcacctccgccaggccctgccagagccaggcagcagctccagccctgcctgaaactctgctcctttagacaggagcaggaagctcacgcctagagagcagtggccagtgccagcctgccaggttgtcatgcatctcatgtcatcccaccaccagacttcgaggtgactattattgggtgagacaaccagggaggtgatgtgactggcctgaggtcacagagctcagccttggggatccgaggaaccagtcatcctctctctccagcccctctcagggaatttctgccaactccatgccaggcgctgcctcctctctctcattgaagcatcactgtatcctttgtgtatttaacaagtatgtattaagcacctaccacagtaacaagaagggttgttatttctcctccccagctgaagaattgcaggctacagagatgccggggggttgaggggtgatgctgagcttgagctggaaatctaacttgagtctgactagctccaggtccttggctcaccctggtccccagcctctggcttcgggaccccttctcctgccacatcaccctgctcaacctgggacccccaggctctccccatccctccagacctaccctgagcccctgaggctctctgaccctgctactctgagccctcaggcctcactgtctatctgcagcacatggcctctgttcaatatgagaaaatgtgctggttaaacccatatgttttgggtggcaagacctggctctcagtctcagctctgtcacctcccagcatatcctctttgaacctcagttttctcatctgcaaactggagatgacgatactggtaccttcctcaccaggccgctgctgaatgaacatgacaaccaccatgcgttattacattgcaggtaaagtgcaaaaactgatgttgataatggtgatgacaaagatgcagaagctgatgaccaagaatgctggactgggagctggggaaccccttccactcctgactccaccactaacatgctctggtcagaagttccttccctctgtctgcaagatggggagaccatcatggctccctggcaggagaggtgggaaaatgtacaaaacgaggcacccagacagagcttggagtcaggtgacagatggggggcgctcctgagtctccttagccccagccatccctgagccctcctgggcctagatggggaggctgactctccagcaaatgtcctaccagagggagccagcacagggcagtggaggtcaggggacgcagcccagggcatagctcagcgcacccaggatgggttctgaagggtagaggattttcctggaagaaatagacagaatttgccgggcacggtggctcacacctgtaatcttagcactttgggaggccgaggcaggtggatcacctgatgtcaggagttcgagaccagcctggccaacatggtgaaaccctgtctctactgaaaatacaaaaattagccaggcgtggtggcaagtgcctgtaatcctagctacctgggaggccgaggaaggagaatcgcttgaacccaggaggcaggggctgcagtgagccaagatcgtgccactgcactccagtctgggcaacagagcgagactctgtctcgggaaaaaaaaaaaaaaagaaatagacagaattaacaccactgtcccatttcccagcccttgtggagcacagagtctgtccccactccagctgaggccctcaggtctggtttgattggaggggctttccactccaacaagtggaactttgcagggaggaagagaactcaagaccccaggcccacggctctttgagctgtacccctcaaagagtaaggggagccaaagacagactgagccacaggggaaactgtggcagggtccccacctgccactgccctctgcaggccctgcagtcccctgtccctgggaggcctgactccctcctcttcatgagtctcaggaaccccccgcctggtgcagcagcttcagctctggagcctctaaacaactttgtgcccatgtgaccttatgcgaggaacttaacctctctagtccctgcatgccccatctttaggagaagctaataatagagcagacttcctaggactgtaatgaggacaaatgggatcatgcacaccacgtgcccagcccagagtaagtgatcgataaggtgcattttactcaaggctgaacattgctccctcttgatttcctcccctcaatttcagatgcagcatcccagagcctgcctgggccccatccacagggccctgcccagtttgtcttcattcactgcactagggagctggtgggcaagaagagcagcctcggtgctgttccacacagagctgggctggaaccaagccgagtcccacttggctctagcaggtcactggattctctgagcctcggtatctccaatggtgaaaggagcatcgcagtgcctacctgcagggcctgatgtggattgtcccaaaagcgcatgccacatggtgggggctcaagaaagctgtccccctccccaccttcttctggaccacgaaatcctgtggtacacctagcccctccctcaccaggcagccctctgacatcgcaaaaattcaggctgagcatctgagcattgagcacgcatttactcagtactttaccctgatcgattcctatcattctcacaatgatctcagaggaaattatcattacccctgttttagaagaaaaccaaggcacagagaggttcagcaacttgcccaaggtcacacagtttgtaagtggtaaagccaggatgtgggcctgggcaatgggcatcaaagcacgctaacaaggcatgctactgtcctgcctcgaagaaatactgtcacacgcttgcttccacctggtacacatccagtcctactacgtgccaggttctgtgaagtcagtcctatggggatggagaaactggatcacagggcaagttggagccaggacccaggttcctgatttcaggtccagccaaacgctggagaccaagctttgggctccacaggggcttggagcagcaaggggtgaaccggctcattcctcctactctgcaccccaccgggccctcccaaccacttggccagcgaatgtggggcgggggagcaggctgacaagcaagctccccaaaatgtccagaggggcctttggtgagggccaaatcacaggcgctgggggctggaggacccagaggccacctgtttcaacccacaggtgtgccctttgctgaattgctgacgccagtcctctgccctccctcgagagcttcccaccctccacaaatacctgtgcccatcttccccacagggctgtgaaggccagtggatccctgaagcttctcttttccagaacaaccgcagctccctcagtggcggcaggtggggcttcaacaccccactgcctggctggggcttccactcagttactatggactgcacgctagctgtgggccagacacaggccttggactcggccagcttatgcaagagctggagagacacactctggatggtaggcatttgccatcacaggcggccggatgtgtgtggcgttaagcagtttgaaggaaaagtacaacatggggtgagtcagagggcgggcctctggtttgatgggcatctccaaaggcctctgtgagaaaatggcagagccaagacttgggtagtaagtgggagtctgtccggagaactgtatatctttgtggaagtggggtgtagaatactccaggaggtcgggcgcagtggctcatgcctgtaatcctagcactttgggaggccgaagtgggcagataacttgaggtcaggagttccagaccagcctggccaacatggtgaaaccctgtctctactaaaactacaaaaattaggccaggcatggtggctcacgcctgtattcccagcactttgggaggtcgaggtgggtggatcacctgaggtcaggagtttgagaccagcccagccaacttggtgaaaccctgtctctactaaaaatacaaaaattagccaggtgtggtggcaggcgcctgtagtcccagctactagggaggctgaggcaggagaattgcttgaacctgggaggggggaggttgcagtgagccgagatcatgccattgcattccagcctgggcgacagagcgatactctgtctcaaaaaaaaaaaaaaaaaaaaagccaggtgtggtggctgtaatcccagctacttgggaggctgaggcaggagaattgcttgaacctgggaggcagaggttgaggtcgtgccactgcactccagcctgggtgacagagcaagactctgtctcaaaaaaagaaagaaaaagggcctggtgcgatggctcacgcctgtaattctagcactttgggaggcggaggtgggtggatcatgaagtcaggagatagagaccatcctggctaacacggtgaaaccctgtctctactaaaaatacaaaaagttagccgggcgtggtggcaggcgcctgtactcccagctacccgggaggctgaggcatgagaatcgcttgaatccgggaggtggaggttgcaatgagctgagatcgcgccactgcactccagcctggcaacagagcaagagtccttctgaaaaaaaaaaagaaaaaaagaaagaaagaaagaaagaaagaatactccaaaagtctgagtctggtgttgagaagctgcaggaaggccaggttgtggctgtgaagtgagcctgggagtgagtggaccaggatgaggccacagaggcggcagatggcaagggctgcggatgtccccctcagggctggcgggctgtcaggctttgcctggtctggttttaatttccatgtgaaatatttaagacaaataggaataaggactaatacaataaagcccttaggccagacatggtggctcacacccatagtcccagcacgttgggaggcagaggcagaaggatcacgtgaggccgtgaatccaagaccatgctgggcaacatggtaaaaccccatctctacaaaaaatttaagttagctgagtgtggtggtgcatgcctatagtcccagctactcaggaggctgaggtgggaggatggcttggacctgtgaggtgcaatcccagcactttgggaggccaaggcggatggatcacgaggtcaggagatcaagaccagcctggccaacatggtgaaactctatctctactaaaaatacaaaaactagccgggcatggtggtgggcatctgtaatctcagctcctcaggaggctgaggcaagagaatcacttaaacccgggaggcggagggtacagtcagccaaggtcacaccattgcactctagcctgggcaacagagtgagactccgtctcaaataaataaaataaaataaagccttgtgcatctaccaccaggcttaagaaatacaacattccggccgggcatggtggttcacgcctgtaatcccggcactttgggaggccaaggcaggcagatcacgaggtcaggagattgagtccatcctggcgaacacggtgaaaccccgtctctactaaaaatacaaaaattagccgggtgtggtggtggacacctgtagtcccagctactcgggaggctgaggcaggagaatggcatgaacccaggagacggagcttgcagtgagccgagattgcgccactgcactccagcctgggcgacagagcgagactccatctcaaaaaaaaaaaaaaaaaagaaatacaacattcctagccaggtgtattggctcacgcctgtaatcccagcactttgggaggccaaggcaggcagatcacgaggtcaggagattgagaccatcttggctaacacggtgaaaccccgtctctactaaaaagtacaaaaaattagccgggcatggtggcgggcacctgcagtcccagctactcgggaggctgaggcaggagaatggcgtgaacctgggagacggagcttgcagtgagctgagatcgcgccactgcacactgcactccagcctgggtgacagagcgagacttcgtctcaaaaaaaaaaaaaagaaatacaacattcctagccaggtgtattggctcatgcctgtaattccaacactttgggaggctgaggcgggtggattgcctgagcccaggagtttcagatcagcctcggcaacatagtgaaactctttccctaaaacataaaaagtaggctgggcatggtggctcacgcctgtaatcccagcactttgagaggctgacgtgggcaaatcacctgaggtcaggagtttgagactagcctggtcaacatggtaaaacaccgtctctattgaaaatgcaaaaattagccaggcatggtggtgcatgcctgtaatcccaactactcgggaggctaaggcaggagaatcgcttgaacccaggaggcagaggttgcagtgagccaagatcttgccactgcactccagcctggacaacagaatgagacgctgtctcaaaagataataataaataaaaataaaagataaacattcccagtataatcccagtggcaccctggcccttgcctcagctagcctttgaagtctgcactgtccagagtgcagtgccagtcgctgtgatgaggtatattcggctggggagaagaccatgatggtagcttggagctaccaggatggtggccatggagctcaaaaggagatggatttgggacacatgcattctgggtgaagagtccgcagggtttgagggtggaagggggttgtcgagagtggcctgtagtggtggaagactgaaacggggccaggtttcgggagcgacggtttctagtgtgcagtggctttgaacatccaaatgcagatgtctacctgacgtcagatcccgagcctccagagggagagtgggcagagctgggtgcatgagatggtgaacgctggtgacaggttgagttgtgagggtgggcgagactggctgggccaagggcatggaaaaggagagggggtcttagacccggccccagcagccccacagatgggagagaagctgcagagcagatgaggaggaccggccagagagcaggaggagtaggggagggaggccagctcacagacaggagagggagctctcagcagagttgcccggtaggccctgcccagcctggagcacctgaggactgaccatggtagccacaagtccctcctccacttggcttccctccctccccagccagaaagggggaaatctcctcatgggctgggcagaaagggaggtgctggggaagagccaggagttctgctgggcgggggtcagggaagttgcagcagaggtgacatggtaacagcccatgtctgatcatcatctgaccctcatccccgcactccagcatgggtggggctgggggtgggggtgaggtggtgtttgctgctgccccatcccattgcctcatccttagctgtcagcaaacaagactccaggagttggggctgccggctggtggggggtgtctcccagaacctagggggatgggggctaatgtgcccctctcactcacacacaggatttctctgggatgctcggctggccccagcaggtgccccctaaagaagtggcgtgggagcagggaggagtgagaacagtcagggctgagttcgagccccactccctcacttatccagtggaggccactgggtggtatcgcctgtgacgcctcctgggccctcctgggactccagcctgagactcacacgtggggaatgagcagccttgccttcagcagcaccgcctggaagcggcccaaatgcccatccacgaatggcacagcacacagacagaaaaagccaggagagagctctgtgaggagcaatgtaggtcttcaagatgtatttttaagcaaaagaaggcaacagtgatgagcggtgagtatagtagctaccatttgtgtaaaaaaggagagagaagaaatttatagatacacatatttgcttgtctctgcttgtctgtggatggagacccaggaagctggtgacattggctgctccggggagggaaagcaggtggctggggacagggtgggaggaagaactgtcactgtattcccgtttgtgtctttttaaattttagaaccgtatgaatgtattacctgtgggaaaatgcacatgaaaagttttaaaattaatgtgtacacatgcatattttccagagaaggcattcataaggttgtgtggccgggcgcggtggctcacgcctgtaatcccagcactttgggaggccgaggcgggcggatcacgaggtcaggagatcgagaccatcctggctaacatggtgaaaccccatctctattaaaattcaaaaaattagccaggcgtggtggcgggcacctgtagtcccagctactcgggaggctgaggaaggagaatggtgtgaacccggtagacggagcttgcagtgagctgagattgcaccactgcactccagcctgggtgacagagcaagactccatcaaaaaaaaaaaaaaaaaaggactgtcaccccgaaagtctgagaacacttcacctatgggctgcgtggctttgggaaaatttcttaacctctctgagtcacatctgtaaaatgggaaggaataacacccagtgaacaggcatgctgccaaggcgaacagtgtgggcaggggtttgtaaactgtaaagtgcagaagcctttctttctttttttattttttgaggcagggtctcgctgtcacccaggctggagtgcagtggcactatcacagctcactgtagccttgacttcccaggctcaagcgatcctcccaccccagcctctcgaatagctgggacttgaggtgtgtgctgccatccctggcttattttttaattttttgtagagacagggcctccctatgttacccaggctgatcttaaactcctgggctcaagtgatcctcctgtctcagcctctcacagtgttggcatgagccaccgtgcccggcctgcagcccttcttgaagggcatgacttactctccactcttcctcacctcctagtctcccctcagccccctccagagctcctctgtgcccccttccctctcagcagctctgatggaggctctggactggccctcgttttcctccttgagtcctccaggcctgagggtccctctccaggtcgccccttgctctcctgcctctggcctctccatgacccacaccgtgcagtgcccagctccgccatcccacctcccttctcttctccccagtcctgtgatctcatccagtcctgtggcttaaaataccacctagcctgcgcctccctcccaggcagctacaagcccacttggctcctgctccctgtgtctgctggacagtgaagaggcatcgcgaacccggcactgccaagcccaagccatgcccccgtcctcccctctcctgccttccccatctcagtctgtgactcctcccaggaggtcgctcaggcctgacacctaggcatcatcctccagccctccctaagcccaaccgcaataacaatgggttaataactaacatgcacttagtgttcactgagggccatgcactgactggtccacacctgcaaggcaggtgctgtcatcatcatcccacagtgggcttgggagcttgcccaaagcgggtgaacctcggggccccggacacgtcccctcacctagtcatccaccccaaagagccacatcactattgcagcccacagtctctgcccaccacctcctcccacagcctccacccacctcccgcagtccatctccacatcactccctgctcagagctctcgtctccccagggcactcgggatgaacgccccgcctcagagaggtcctgccctctctgactgcaccccctccactctccaaccacgggaagagaccttccttcccgtccctttaacgcaccaagtttattcctgtctctgggcctttgcactggctgttctttctggttgaaattctcttctccaagactccaccgcttgtgccttcctaccattcaggtcttgattcaaaggctgcctgttccaagaggccccgaggccctccctcccatccagctctcagatcttcctggcagcccttagcagtcaaaccagtctcatctgcaacatcattacaggcaggaaccttgcctccctacttcaccccgactcccagagcctggcatagagtagctgcttcataaatatctaacgactgacaaacaagataacccagcccgtcaaaattcccggaaagggtctaactgggtcatgtgacacattgtgaccaaggagaagctatttttgacacggtagtcagggagaacttcccagcggaggtggcctctgagcagtgaccaggagaccctctgtgtcactgtacatgagcacaatggccatgagcagaggggacagaggacaggatgtcagagggctcatgcctctgcctcaccctccacggagcatgggcttctcttcccaggtgtcccccaggtgtcaggggctcgggggaggatgtcctggcctcacccagggatgggtggcagggacatgtgtacaggacctagtgggagagggcatgggagacaggcctcagaaggaccagagacagcaggaggaacagtcagcccctgcccatgactcaatgctgggccacagccccaagggactgtcactgacagaacgcctgccatggggggggccacgggctgcatgcccctctttactgctgaccaccttcccactggctcctcaggccagagaatctccaactccagccgacccccatccatccatccattcattcatcaccctaaatgtcccctgagctggaacagcatctgccttcctgccaggtgccagatgtgtctcaacacagcgcagtgccttgccttggagggcggtctgtaaataattgagtgaacatttattgagcacctactgtatgctgaagggaagcaggtaagtcacaaaccggctttgctgagctccgtgcacgcatgtgtgcgtgcatgcgtgtgtgtgcgtgtgtgtgtgtgaaagggcataaagagaaggtcctaggaagatgagggcaagcaggagggcacaaggacagagcagggctgggcctgggctgagcggaaagcagggaatttggcccggcctgggatctaggccctggggagaggtggtggctctggaggagcatgggtgcctggacctgggtggtccactgagcaagggacaggcggctacttctgagggcaggacagcagcatcctggaagttgtggcacctatgtctttaggaaccaaacatccagggaaatcggaacctgagcatcagaacctctatcagggcgcctcctggatttctacacaggacagtagctttcaagttttttgaccaaaatccgtagtaaaagcaaacatcctgtttgttattttaacttactttatatttattttttagagacagagtcttgctccaatgcccaggctggagtgcagtgatgcgatcacagctcaattgcaacctcctgggttcttgccatcctcccgcctcggcctcccaacgtgctgggattacaggcgtgagccactgcacccggctatatatttaaagctgaagtaagagcgtcacaaaataatatttaccctcactacatgcatagtattttgaaattttctttttaatttcattttcggaaaacaagtagtgcaactcactaagtcaatttcccaacccactaacggggcaggacctgtgtgcaattttaaagcactggcctgagtgggggttaggagcggtgaaatgggatccggcgtgtgtcttgaagctgtgacgggcggtgcttggactccgggctttgtgacacacaaccatgtggggaattgttggatgttatgggggaatactgggaaaagtctgttagaccccccagctcacaggaccgccactctgcagcccaaataacagggactctttggggtctggttccaattttttccccgggtcttttaatagagccccctcctgccctgataacagatgccattcagcagttgcttacacatctcccaggacagggcgctcacccacttctcaggcagcccacttgactgtgaggagtaagctctgccgggctgctgatgtagctgctaagtggggccccgcccgtggctggctggccattctcctctgtcctctagcctgttgtctcagggagccgggacagctctggcaagtggtcctctctctgccccacccagttctctctctctgctgcccagccactgccgggtgtctgttgggggcagccttggagcccagccagagagaggccctttccaaggtcaggtgggctcaggatctgaagcctcatggcggggctggcactcagccagccttgcccaccaaagcagttctgggggcctgggtgagggagggccgggggaggctcagctgtccagagaagtggtaccccaaggcagtggctggtgatgggggtctggaaatcaggcccagcagtgcccttgagtggttgggtcacaaagtagttcatatcaacgagctatgatacattcattcactcacaggctcacaggatcttcccagtcaccctcagaaacagatgcaaagggccaggcacggtggctcatacctataatcccaccactttgggaggctgaggtggatggatcacatgagggtcaggagttcgagaccagcctggccaacatagtgaaaccccatctctactaaaaatacaaaaattaaccgagcatggtggtgcgcacctgtagtcctagctacttgggaggctgaggccagagaattgcttgaactgggaggcggaggttgcagtaagctgagatcgcgccactgctctccagcttgggcaacagagcgagactccatctcaaaaaaaaaaaaaaaagaaacagaggcaaacgcccacccttacggggcagggggtaaaggctcagagaggtgaaaaacctgccccagattccgcagctgctaaggggtggagctggacatgaacccagatcttctgtttcccagtcacgggcctcgcctgggacaactgaggctggaggagccttggggtaggggagggggaggtgggccactcctcctgtcttgctgagagcaggctgggtttctctgccccagagggcagggcgaaggaaagagggagtcagggatcaattagcagaaccttccagacacgagtgggcttccccggagatggggagctccccgtgaggaacagtgaggagggacttgaggcccatttctcaggataactgcagaagggtatccatgggcacgaggtttgaaggatgcccaaagcccctctgcctgctccatttcacccccagccagggcctctccagcctgtgcccaccacctcccctgtatggccccaaggagcccctaattgcggaccccatcccatttgtctcccaggctgagtggtaccttcacactcacagggcagagggtcctgggcttctcaggcctatgaggagaggggaggctcctgggggagtctagggtgggggctgggagaggagctgcagggggttgggggaagcttcactgaggtgtcccaggggccaactctgccaccaacttgaagatgggcacacccctcccctaggcctgaatctccccatcagtaaaatggggtcagctccccacagcacatgcaccctctcctgtggcccagctaaagaaccctcccgtccgggtgcagtggctcacccctgtaatcccagcactttgggaggctgaggcaggcggatcacaaggtcaggagttcaagaccagcctgaccaacatggtgaaacttcgtctctactaaaaatacaaaaattagccagacgtggtggcacacgcctgtagtcccagctactcgggaggctgaggcggaagaatcacttgaatctgggagggggaggttgcagtgagccgagattgcaccactgcactccagcctgagagacacagtgagactctcaaaaaaaaaaaaaaagaaaagaaaagaaaagaaaaaagtagccgggcatggtggcgcatgcctgtagtcccagctacttggaaggctgaggcaggagaatcgcttgaacccgggaggcagaggttgcactgagctgagattgtgccattgcattccagcctgggtgacaagagcgaaactccgtcttaaaaaaaaaaaaaaaaaaaaggaaccctcccatccctgcagcccgggtcgctggtgtgtgagcttctcccaggacaggcaaaacaggaaaaggctgagcacgccccaccatccccatgggtggcccccgatacacagaggggcaaagagaggcccccagatggacagtggcctagtcaaggtcatgcggagccagtgaggggctgagctgggattcgatcccaggcccctgacgcaggccacccttcctactgctgtgaccagggagtgctgcccttcccctcgctccgatctggggattttctggggagaaggagcttaaagagacccagaccctgctcgcctcccacagaccccacagctctggggagtgtcagtgagagaggaggggccggcagccctgggagccatcaggacacagaggagtcaggagcagctccgggttgagaggctctgccaccattgctgagtgaccctgggcaaaccctggtggtctccggactcggtttctccatctcccaggagaggaaatggagagaaggccaatgcagccgcagacaggagctgctgggccaggcttggtgggggcttctcctccatcccagtcccagggagctcctccgcccaagtgcacctcccatgccccagctcccctctgccatgctgggggccccccaggcctagaccaaagctcccagctgacaggtcaccattacaacgctgacttctccctccacagctcctgctggggtcgggaacaccaaggaccccctttcctggtagcccctaaggacctcttgacctgccaatgtctcatctggggcacctcaccctcccctgcctgccaaggccagacgtcccagctgttggcaccagggctggtcagggactggccagcagccacagggaggagtggctgagctgttgcatggaaggaaaggggaggcctaggctggcagacatgtacccacctcccttcaggtggccaatgagggtcctggaggggctggcactgggtgcacagtaggacaaagcatctgtggctgtttccacccaggagcctggaaccaatccttgcttctctctgagcctcagtattctcatctgagaagtgggggtgatggttctcccagggtggtggaggattaagtgaaatcatgaatatgaagcccagcgctgagcctggcactcagcttccctcctgcagcaataccctgagaacactgctctcaccccagccaccaagcaacggcaccagccatctgagcagccctcacgcatgcgcatgcgtgtgtgcctgtgtctgtgcctgagcatgcacgcgcaggctgaaagggggctgcgagcaggtggggcaacgggtgcagagggaggggcaggggccacacgccagcactcctccccaccggtttcccaccctgtgtgtcccaacagagaacagtggtcttagaatcaggcaaaacccatccattcaaatccagcctgtttccagccagccacttccccttgctgagcctcagtttccccttctgtaaatgagaatcatctatgtccaaagtcttccaggttcacgacagggaccccgtgttgggccacggggccaggattggtcaagacctttgggagtggggggccaagaccagagcaagccagagcgtgagctcacccctgctccccatgctgcaccccacccaccaccccgtgagcgcccgtgtgcgcgcctgcaggagcgcgcgtgtgtgactcaaggtctattcatagccgagctccaccagctgcagcgtcacaagcagaggggcctcagcccatattattatttcaattaccatctgaattaaaagtttgagcagcgatcagcccacgtagcgaggggaagagggaacaggagaaaaataaagatgaaaaggagaagaagggctgtgactggcgatcccccacaccccaaggagggctgagtccgcagaggaggcttaaaggttatgccaacccctaggattcccgcctgccccttgccaggacccacagtcctcccatcgttgggaggagcgcttttcgacagcagcccaaccacagctactcggtggaaatagatctttcagcccaggttcacatggatgggtggacatcactcggagagggtgagggactgacctaaggtcacacagagagccacccaaggaagttgtctccaagaccctctcctgccagccaggtcccactgacctcaccaggctctgtagcacatgtgccatttcccttctgctcccctctccctgcgccgataactttcctcctgcagccctagcttggagccagccctctctcagccctctgcattcccgacctcacacctcatgccaccaccgtcagcccaaaggcccctcctcactcactggcacaggggacagagccctgggccaggagacaggcagcctggccctaatctaactctctgggcaccttcgggcaggtcattccttgtctctgggcctcagtcttcccatctatgaaatgagttctcccctaagatgcatggtggtatctgtcttcagaatggagcccccagaggagccagaggatccctgagggggtgtcacgctgtgggggcgtctagaccatctcctgccaagccccagccccagggaggaacgttttccactctttccccagggaagccccagagacagcccccgagaatcagactagtctgaactcacacccaggctcctctgctgtcttactgtgtgaccctggacaaatcacatagattctctgagccatggcccttccatctataacacggggacatcaaatcaacattgccatggagaattaaatgggaatttgcaaaagctcctagcccagtgcctggcgagcaaatgtgtttcctcgctgggaagcggggaagcgatgggcactgcttcccagctcctctttgggaaacaccaaagactcctaggattttggaagtggggatgttattcggcctcacccgtaaggcgagagtcacctggcaggtgctcatctggctctgcttgaatacctctaggattgaggagcccactatctcacaaaacaaccacagctgctccctatcttgctccacctccagctctgggaattttctagaatggagcataagcttccagttaaccccaaatccaacctgtccttgcctgggactgcctgaaactggctttaaaatgagactgaaaggagttcttcaaagagaccaatagagggaggggattagtgcccaaggacagtggggtgaggggatctggagagaagggagggagaaaggaggtggccgaattcagagctgggccctcaaagctcctgggtcctgtctgggcttgccacagtgttacacagggacatctgtctgtctgcttccagatagagctgggagccagaagccctggattcaggccctggccctgcttcctccacccccaaaccatcactgtgaccctcatgggtccacttccccctcaggcctcagtttccacttttgtaaaacaatggccctggctctgcttcctccgcccacaaaccatcactgtgaccctgatgggtctacttccccctcaggcctcagtttccacttttgtaaaacgaaggcatcagaccagtgatttaagctccaaaccttctgtctgaatccaggcaccctcccactctaccctgtccaacccctgcccagcatgctggatccacgggcccctgagtgtctatggtttcagagtcagaggccttatctctactcctgtctcctgctttcatagctgttgcctttgaggattctgtcatccccattttacaggtggggagatggaggcatgaggcattgaagccaattgctcaaggtcacagagggtgatttgaaatccagggctccctcctctgggcccaggagagccgcagaacttaagggcaccttctttcaggagaatcgccaagatcttaagtggccagccgttctctatacagatgtggactccacatgaggcaaggggctgcccaaggtcacagagcaaggcactgacagaccagggtcctgaaccaagcctccctgcccccaggctccacccagacagggggctggcaacatgacctgactttctgccctggtcctgggatctccccaagactggagcccacgtcctgcctctagccgctgcccccagaagcccccgagcatctagggctgagatgggaagagtgagcaggaagacaggaaagaaagttgagggctggccacttgcccccggccctctggccctcccctactgctctcctcgtgcagggggagcggcggcggtggtgatgtaatgcactcggctttcgtcccggtgccaatctcagaagagagacgacagattgcgtgagccaaatttggcatcctagggggagaggcatgaaaagtggagatgtggaggagcagagaggagcctggggtggtgcaggaggagccccctgccctacagccccgaggtgcctcccctccctcccctcagggcccccatctcttccccagctagcctggccctggggcctcccctcctcactctgaggggccagcctggcttctccccggaccccttgagcccggcactgccaggcctacccgccacccccaccccacactgctccagctctgtttcccaccgccgctagtttcctggttaccatgttgccggttgtcatgtcgcttacatgtcctcgtgactcagtggtccccgcagaggggccccctcctcctcacaccccccttagcactcgcccccgcctcccccagatccacattaagaaccagcccgccctgtaagcctacactgttcctcctccccttccttcttatcctaagctaagacatcttctcacagcatctcccagagctacttcattctctctttcgcaaatgtctacgaacctactatgctccaggctggcgcacgcggctttcacagacctgacacagtctggaaactgctcaacaccctgatgaagtcagtatcatcatacctattctccagttgaagaaactgaggttcagagaggtcaagccacccacccaaggtcacccagcagaaactcaaccagctctgcctggtcacagccactccagaggattttctgagagaagagctttcttttcaaggataacccaaagggccatgaggaattgtaccccagattccccctctaatcctggacactcctccttcgtcagctatttccgccatattcccactgccccacgcccacctccacccactagctgttcatctctcttaaggtaaagtgagtctttactcccatctccccagtgctttccccagcctgtgaacagcccactgctcattgagcccagggcccgccttggaggtcactggggcagggagtgacgtccccatgccacagatgtggaagatgacggttgggaggagagtgaccagcccagggggctgctctcccagccacctgagctaatttctgggaggctgaatggaggacatatgagacccactgcccagtgtggaacaccccagaaagagtccctcctcccagtgagaatggagtggaatgttctaggctcagcccttccaactccagttgggatatgggtcagttcagtggccaacagtctctgttcccaccatgctgcacccatctcttaccccagctgccctggtccaccttttgctcccctcagcacaggccaagccagggccacagtgaggctcttgggcccctaaagtcctgctaactgcccccaaaaggcctgaagccatggaggtcatgggactggatgtgggggagaacacacacacacacggctccaacccttctctgggcctccctccctgagttccccacttcccccaaacctgctgctgaacattctactgctcttgaggccctgctctgtcagctggccaggctgccctgcctctagcccgccgctccaccccacccagcttgccacctcccaactccctgcatcctgtccatcctgaagcagggacactgggggcagaaatgtgggtagggggcagggaggctgacactggtggggggacatttggcaggttgcaggggaagttctccctgcgggaggctcattgagacctctcttgccttggggtgctccctacacacggaggaaaaagcagcctctgcctccctccccagcctgtgtctatcactgtgaacgtgcagtgcctcctctaccaatccctgcccctgcgccctggggtcgtgtggcgccaagtaggtgctcaaaacatgagaagtgagatttcgttcttcagatcacagggccatttgcaacgaggatgcagctggggaggcggaaaggcggcatcccccaccttgccacaagtcacctgccttgaagctccccggcatgacaactggggtgggtggaggcagggaaaggtcatggctggggcaggaggtcaagaccccttccacccacctctctccccctttccaggccacaacccagaccgcgacgctcccagacggacagacggacagagcccgcccgtggagcccgcccgctcccggggagtcacgggaccgcgcgcgcggcgccgggcagccgggacccggctccggatcaggtgcggagcgggcggggccggagcggcgggcccgggacacacagacacgcacgcggcgggacaaactgacggacagcgcccggggtgggcgagcgcggcttaccgctgggcggagggtccgacgagagtccgggaggcggcgagcgggcgctacatcccaaggcgcgatccggcgggcggcgtcccgggcgcggaaaggggagtcccggcgccccctgcccgcgaactcggccggccggcccgcgctcccctccccggctgccgctcggtctgcgcgtgggtcttggggtctccgcgcgtcccggccgtcccgcgccgctccccgcgggccgcccaactttcagcgctgccccgcgccgcgccctcggcgccgcctcggcgtcagcatcgtcgggcccggccgggctcacagcgcgggggtccgggggcccggggcgccccgccgcccgcgccccccacccccgctgcaggcgccctccccgccgccgtcccccgctgcgcccagctccctcgctgtcacccgctcctgctcgcgcgctctgcccccggccctgcgctccactcccggccccgctgcgctcggccccggccccgcgacccctcggcctcccggcctggggtcgccctccccgcccccgccggccgggctctgtcgccacctccccgaccgctctcgcgtctctctcctgccgccggggtctccgccgcgctcgcgtcccggtccctctcccggcctccctgcctcctgcggccccgctcgccctctgcccgcggggtctccgtctccgtcgcggtcgcccgccggcctccccccgcctccctctgcccgcgctgcctctctcccctgcgcgtctctgtccgtctccctcgcggcccctgtccttctctgtctctccccctcccactctccgtgcggccccctctgtctcggaccccggcccccgccttggccgcgtccccggctcgcccgggagcccgagctcccgccgcccgcggcgcgccgagaactcccaactcgcggcacgccgccccgctttgcgagactttcgcccctcctcacacgtgacccgcgccccactgcggaggccgcgcgccccccagcccgggagccccggctgcccgcgggaccccgccctgcccgcccctcggcctaacccggcctcaagccccctcccgcggggcccgcggcgcggagcaggggctggggcggggggctgctggccccgctcctgccctggatcctgcccgggttttcctcctcgccccaggagcgctcctcccagaacccgttcctggatccgctcccgggttttgtgccccccccccaaaagggggcaggtggagagggttcctccgagccgggaaggggggtgggtgggagctggtccctctggggtcccacggagtccgcccctctccttagcggtcctcgtactctcccaaagtaccgccggtcaaggacccgaagcacctcactctgggagtctgagggggccctattggagggaccctcgcgatcactcagtcaccactgccccattttacagatggcgagactgggtaccagagagggtcagaaactcggccaaggtcacccagagatgacaaagccaggccaaaccctagtctcttattctctgtcgctctccattaccccaagctgtcaggcctgggccccacactctggggtgtcagggaacccccagcacccacagcacctgtctagccagctacatcctgaccatcctgccacgtcactctagccctccgaggagacaggagggaaagtgctcctccttccagggtggtaggacgagagaacacctgcagttagacagccagcaaaacttccctgggagtctggccatcaccgactagccccattacagagagggagagaccgaggcaccccaaagccaggtggagaactgatgaaatctgaaatcccctctggctctcctgagcctcgaggatgtcagcataagaacagcaacacacaaaccaccacaagtgtttcccttcttcgtgggctctccctactcaaaaggattcagtcccaactcctcagtgtggtatagtcaggccccaccttatccggcatcccacatcccataaatccacaggtacaccctgattccacagattccagaacacgccacaggcctccacacctctctgcctgcacgcactgttcctcctcactaagatatccttccaccttttttgcccagagaattcctgctgttccccaagcccagcctcagtgccacttccttgagaaggcctcctgatgaccccagcagaagtcatttatcacccactcattcattcaaccagcactaggcacccaccacataccagcccctgggcggggcacaagtatggttcttgcttagtgggatgaggagtcaggctaacctaggctcaaaagcacctaggagctacttgaccttgaacaagtttttatttaatctgtctgtaaattgaggaccctaacgtcctccattcccaaggggtagattaagtgaggtggatgcacaagaaatacacagatcatggtaggcgctcaataaatgtggccatcctttctcacggctctctccgactgtgcagacctccagaacgcacgtcctgttccacgcctctccctggttaccctgctgtgtcctcacaggcagacagccaggactgatgttccatcacatgaatgctcagtgcgtggatgcaggggagactcaagcagcctgagtgccctgtgggcaagagatgtgtgcctggtctttttcaccttttctgtggatggaaagtgggaggatgagggtgagacaaatgacctgcctggccacgggctgacctggtagccatcctgggagtgtggggtgcagggagaggaggaaggggcaggaaggaggggaaaatgcagacagagatgtctgtagatccaaagcatctactgtcacagaatcagtctcctgatgccaagtccctgggcacaaacttgaagatgggatgggggctctggggcaaggagggttagcttgccgggcctgggccgcaccctggggctgctgttcatcctgcaaggagactggactgggaggaggtagggagaggcaagcagaggagctccaggcagggagaggttcggaggccccaggaaagagccctttctctcctctccagccctgtgtgaccctgggcagctcaactctcctctctgggcctttgtttcctcatatgtaaaatgagaactataatacccactttgagcttcggggtgtgtgtgtgtgtgtgtgtgtgtgtgtgtgtgtgtgtgtgtgtgtttgttgttgttgctgtttttagataggatctggctctgttgcccaggctggagtgcagtggcgcaatctcagctcactgcaacctccgcctcctgggcttaagccatcctcctacctcagcctcccgagtagctgggaccacaggcatgtgccaccatgccaggctaatttttgtattttttgtagagatggggttttgtcatgttgtccaggctagtctcaaactcttgagttcaagcgatccaccttccttggcctcccaaagtgctaggattacaggtgtgaaccaccgcacgtggtcgagcagctgttttgaggataatcaaagactaaaggaagacttcacattgttcaccttccgtgtgagtagcctctagccctgtgtgaggttgggggcagagatggaaatgggcatgcagaggcctgggggcagtgtgagggagttgagaaaagtcttgggtgtcagaacctgtgtgaccctgggcaagatgcgtgtcctctctggacctcagaggcctcgtctgtagtgggacagtgtggactaggtctcccaagggtaagtgggctttgtcatgatccaccacagatgcgcccccccaccagacggaatgaggacaacctgcttcccctgcactcgtacccctagctcagcactatccagaccttcgcagggattgtctcctttgattcttgcaagaattctccaggcacctgttaccaatggggaaactgaggcacgggcagtaatgccatgagtggcagggccggtgtggccaggaacaatggtctggaggaaggaggttcgctctgaagtttggaggagaatgcttgtaaaacctctgtccaccatacactttggtaaaacgtcctggccatctccattctccattctctcctttgatcctcacaagatctccgtggggtacgggctatgcctgtctttacctcacaggtgaggactctgaactgacacacagagaggggaagtggcttgtctggggtcaggcagtaagcaactgtctgggccaggatttgaaccaggctcaacttccactttctggggaaaggtcattccaggctagcagagcactcactaaccgatttactgtggggtcctgctcacacctcctgggtcctacaggggccctgagagcctgtgtagagggctgagaggagtggaagggagggcaacttgggccaggcaggtggacagctggggaggagacggaaaaggccacttcaaaatgctagagtcacagaggccagaggtttttgtcctagagagtgtcttaaagttcagccagggccgggcgcggtggctcacgcctgtaatcccagcactttgtgaggccgaggcgggcagatcacttgaggtcaggtgtttgaggccagcctggctaacatggtgaaacctcgactctactaaaaatacaaaaattagccaggcactgtggtgcgcatctgtaatccaagctactcgggaggcgaaggcaggagaatcacttgaacccgggaggcagaggttgcagtgagctgagatcgcgccactgcactccagcctgggctacagagcaagactccatctcaaaaaaaaaaaaaaaaaaaaaaaaaaaggtccagccagcccattctgcagatgaggcaaactgaggtagcccagatacttagattagaaatcagatcaggacacagctggcctgcctcggagctctaaagtcccaggagcttccagggggtgaggtccagaggtgattaaagggacactggggggccagaggcccagaacccatcccagcaggctgtgccctggggacagaggactgtaggggtctctcctgccctccacctccaccctcgcccaccccccagcactcagtagtcaccagggtggaatattttagcacctatagaaaaaccgccacagacggccgtggcagctgttgctaaggagacgctcccaaaatagcccccctccgccaacctttcccgctgctgctcctgctgtggggaggggaggagaccaggcagggagggggtggcacatgagtgttcgccctaggctcacccacccaccctggcccctggtgcccaccctggcccaagacctgggcagccacaggtctgtggaagggcaggagctgtcccatgcatgcctgtgatctcagtcacagtcctcagctagggaagaaggtcactcaggtgataggagaggggggagcagaacccccgcacccaagaccccccagcacactcccacacatacacaattacaggttatcacagttctccacatccactgtacacaccacaaatacagtcccacgcatgcccaccgaggggtacacacacatcagcaaagctgcatcagatgcacgggtaaacgtctgccacaactacacaacatccacctgcacacacacaccatggagccgcaaagacatgcttttatatccacatattcacacacccatcccaaatacacacgtacaccaatatatgcatgccaggcacacggacacacacacacaccagtgtacatataccctcacagcacatggacacacatattcacagatacacacaactgtccaaacacatgcccagcctgtggcatctaaagggcaatcagttgtgttacccagtagactctgtctggggtgctgtgtcttagggtttccagaaatccttacttagtggggaacttctacaaccacagggcagagggtaaggaggaggtggcaggcaggtggatgaagggttgtgtctctctgaacccctttaagtctggggactagatgatgactggtgctcaggagagctgccctggacccacttctcgaaggggaaagtggagtagactctcacccgcagacttgaaacttctgggcacagagatttctgagccccaggggctggggcgataaagaggacaagatggcaattgggtggcaactgtgatggtctgtggcatgcgcaaggcacgttccagttggtgagccgctttcacactccattatttcacacgcttggtaacagctactctgagatactggtggaggtgtccccatgtctgagtctcagagaggagagagaactccacgaccacacagtaagttactagcagagctggacccataacccaagggggtgccagcacccagccccagtgcctggcacttggctgcactgcacgaacttggaaggaggccaccgggtgcagggcctagctctgcccctgatgagccccgagttactgggggggcagccaggccctccatcttcccacctggaaagctgagaatgaatccccaggggtgttttcaagcagcggcttgtggccaccgtcagggctggggagtggtgtttgccggaagtcctcggaatgccagcgcaaggacgaagggtggcccagcctctcccctcctcgtttggccagccgcggtctctctccagcctcgctctgtgactcctgaatccgggctccgggtcttcgttcgcgcctcgtcactctggagacgctgcgagcggcttgcggttgccgtaggaacctcgccagggcctccgcgaggcgcacgactccgcgcgctgagagccgcgttttggtcaccgagagacacctgtcgccagcggcgaggggtgggggcgtcgcggcccgggttattatgcttttctttttaattgaggtgtaacttacaaatagtacagcgaacatcttaaaagtacagctctgcggggcgcggtggcgcacgcctgtaatccagcactttgggaggccgaggcgggaggctcacttgagcccaggagttcgagaccagcctgggcaacatagcgagaccctgtcttttagaaaaaaataacagtgtaatggcgtgcacctgtagtcccagctactcgggaggccgagccgggagaatggcttgagcccaggagttcgaggctgcagtgagctatcattcctgtcactgcactcctcctccagcctgagcaacaaggcgagaccctgtctcttaaaaagaaaaaaaaaggtacagctcgattaatttttcagacatactcataaaactcgtgttaccaccaccatgatcaagacacagaagacttccaggccctagaagtctcacatcttcaggaataaaccagtgagggagaggtcaccatctgaaaccctggagttgtctgtttttgcccctctctgctctggcagaccctctttgggcctcagttgcctgtgaagggaagcaaggagctgaggtgacgtgcattgcgtggtttatatcttgcaaatcgctttagatatttagctaactttaacccggataactattgtatgaggtcggtacttggtttatacccaggttaatgatgtgaacactataacttggagagattagctagtctaaattcagatagctcttaggtggtggagtttgagggcctaactcatctgtctaaccttaatgctcatcttttccttcttcccttccttggcctctacaggccgggcgcggtggctcacgcctgtaatcccagcactttgggaggccgaggcaggtggatcacctgatgtaaggacttaagagacccgcctgaccaacatggtgaaaccctgtctctactaaaaatccaaaaattagccgggcgtggtggcaggcgcctgtaatcccagctactccggaggctgaggcaggagaatcgcttgaacccgggaggtggaggttgcagtaaactgagatcgcaccactgcactccagcctgggtgagagagtgagactccgtctgaaaataataataataataaataataatgaatggtacaagtaaaaggcactgaggggcgggggggcaggccacgtcttatctcctcgcctttgtgcaattagtaccttctactggggactctcttctcttccccaaggttttgtctccgaggcaagctcctacacaccctccaaagcccactagagcatcatttgccctaaagccttctttaagagcagtcctcccagggactccctccaacagacagtgattgccatttttcctctgtgcggtccagtccgtgcacaggcacccacctcccacagcaccagaaaggcccctggaggctgcacctaagttcaaccctcaaggcgcctggtgcccagctggtcttcagtaaatgtgtttgtaactaaaacgggaagagaggttttgaaccttggtgtttataaccttggtgtgtcagtaaaatgcggcccgctgcccctgcctcctgtcactcaaaatatattgagctggggaaagagcttcccgaacacctggggtggaaccgcagggagaggaaggctgggcccaccccgcactcggttaggaaatggactcgtccgcgcctccgggcgggcgggacctcaggggctgcctgggaagaggtcattccttccacgggggagcgtccactcgcctaggccagaggaagacttggcggcctagaggaagctctagggagccccggaagcccgggacatagctttccttccaggcccctgcccggtgagagacagccaattaagtggagtgattttcactttacacccctatttccttccacacagaattggaggcagtttgcaggatattccaaacagtggtgaaatataagaaagggctaggaccagaaaaagagagcgagcgagagagattatatatacctatttttaaaaaataattgagcaagtcccccattctctcttccataaatctgactttgaacgtagaatttgctttgttaagtgagaagaaaacagtccttgccctttgagctaaaggaaatttccctctttgctttcccctgcagcaggcacatttttgagtgttgggaaattgaggctcagagacgtgagggacttgctggaatccacccagcagcagggacagatcgtgaatgaccatgcaggtggccagagtgctggcaggggctagagccaaatgttttccgtgagtaaagggtttccccttttctccatggggagctttgaaagtctccacctgggagcctagtgggcacaaaagaggtggggctaattactgtggacagagccttaggactttggggagaggagagccatgtgactgaccttggggagcaagagacaaatttgagccccgatttcctcatctgtaaaataaggacatagtatccatttcatagggacatcaggaaaactggatgcaaagagcaatggctaagcacctgcaatacttcatttctttttgagacagggtctcactgtcacccacgcccagtttcaagtagagtagcgcaatctcagttcactgcaaccttgacctcccaggctcaggtgatcctcccaactcagcctctcaagaagctgtaactataggcacgtgctaccacgcctggctaatttgtgtgtgtgttttttttttttttttttttgagacggagtctcactctgtcacccaggctggagtgcagtggcctggtgttggctcactgcaacctctgcctcctgggttcaagcgattctcctgcctcagcctcccaagtagcttggattacaggcgctcgccactaatccggctaatctttgtatttttagtagagacggggtttcaccatattggtcaggctggtctcgaactcctgacctcaggtgatccgcccacctcagcctcccaaagtgctgagattacaggcgtgagccactgtgcctggccataatttttgtcttttttttttttttttttttgtagcaatagagtttcaccaggtcgcccaggtttgtctcaaactcctgggctcaagagatttgcccacctggcctcccaaagtgctgaggttacaggcatgagccactgcgcctggcctctttttagttttttctttttgagacaaggtctcactctgtcacttagtttggaatacagtgatgtaatcatagctcactgccgcgttcaactcctgggctcaagcgatcctcctgcttcagcgtctcaagtagctggagccacaggtttgtcaccatgcccggctaatcttttttttattttctgttttcttaattttttgtagagacaagtcttgctgtgttgccttgactggtcttgtactcctggcctcaagtgatccccctgcctctgcctcccaaagtgctgggattacaggtgtgaaccaccgtgactggcctacatctgtctttatttttcccatttatcagatgagaaagctgaggcccagagaggggacgtggcaggctcaaggccacagtggcaggcctgggacaaggtctagcccctggagccattcagcttgggttccttcccctccagcaccacggtccctcctcagactctccctggccttggccagtttccctgtggtcttgaggaaataaagggaaggggaggatccagcctcattccagccccacgtcccccccaacacacacagtgggggctgcttcccaggaggacagatgttttcaccaaatggcacttgcacgtgcttttctctggcttggggaggaggtgggcgctgagaaggaaatgccagctggttgggcagagacaaccgcagccacacctgagggatttaaatagcctccgccttctctgggcaccggctgaggaggaggcatctgggcagggttggaggggagcggggaacagaagggccattcggaacctgccgcagctcagggatgagcgcctggctcctcctcccagagggacctggtctaggcacctcacctccctggacctcgaggttcatcccctgcaaagcgaggctctgaaggccgctgaaccacgtgcctgttgatggaaagaacctgagtaacaggcctgacccatgcctggcacccagatgctcagtacttgacggctattggggtcaccacctccctgccagggcaggagggcctgctgctgagtctctgacaaatgagcgtccaccggccgctcacccacctctcgcgacagggtgctcatcacctgccatggcaacccacagtgtaagggaatgatttcatggtagaccgtgtgttggaatctgggctacaggactgcttggtgtctgtgtgacctcaagcaagttatttagcctccctgcctcgctttccccatgtgtgaaatgagaatgaggccactgcttcctcacagtgctgtttagatgagtgcctttggaactttacagttaaacacgatccccaggggattcgtgtgcacatcggagtctgattcacccgggaatgcctggggaggggctgagattctgcattcccaacaagcggtagcaatgctgctggtctttggactgcgtttggggtctcaaaggactgccttggctgggcgcggtggttcacgcctgtaatccccgcactttgggaggctgaggcaggcaaatcatctgaggtcaggagttcgagaccagcctggccaacatggtgaaaccccatctctactaagaatacaaaaattagcctggcgtggtggcgggcgcctgtaatcccagctacttgggaggctgaggcatgagaatcgcctgaaccagggaggcagagattgcagtgagcagagattgtgccactgcaccccagcctgggccacagagcgagactctgtctcaaaaaaaaaaggactgcctttccctgggaggaaaagtagggaaagtagggggcatagggagccatagaagggtcttgaccactgaagtgacagatttttatcacagaaaagaggctggccatagtggcttatgcctgtaatcccagcatttggaaggctgaggcaggcagatggcctgagcacaagagttcgagactagcctgggcaacacagtgagaccccatctctgtttaaatacatttgtcatggaaaagcctctctggttatctgtggcaggaggtgggagtgggaggaggtccgttatttagagagagatgagggcgctgaatgggaggagggcttattcaggtcaaggaggggaggctaagggccctcagctcacctggtccactctttcagacgcagagacttatatccagagggggtggtggacctgctcagaccacacagccctgggaggactccctcccaccagggacccttcactccccacccttcctggtgctcagccctcctgggtctctcctgtcctgtgtgtccctgtttaacatcctagtaacaccaagaagagggaaggcacgaacgagggccctggatctccctgaccagcttgacctcctgcctacccacaacaacccgattttacaggtgagaaaattgagaccaagagagaggaaggcccaccgacccaggctgcagccgaggtcagtctgattctgctgctgagtggtgtgccattaccattgtccacctgcagcaagatcgggtcccgaccgggtggacaaccaaattaacagacggaggtggggactccgcttccggctcgccccgccccaccccactctcccagggagggagctccagctccgggaagatgaggacaatagcaggaatcgccccacagggtacttccacgtgctggctcctgccaagcgctggcaccagtgttatggggcctgtgtacagatgaggaaactgaggcagagattggggcttggtggcaggcctccagtttctgcggagggaaggcagagggcacttggggcatgggcgacatgggtcgtggcgggcacccggcgcacacggcagccgggcgcaggccagaagcccccccgcgtcgccgggccgcccagtccgggagccgggcgctgggatgggcgggaggcgggatctccgggccgcgccgcttcctggctccccaccctgcgccggcggccgccctggccacgtcaccgcccggccaagagtgcgtgggcggcggcgcgcgggtgcgatcgcggagctgtgaggcgcaggcagggctctggggcacctagagaccggggccggagacgtggcagccgccctgcccgccagaaagtttcctagaagtttgctgggcgcgggcgcacgactgactggctggaccatgaacgtgttccgaatcctcggcgacctgagccacctcctggccatgatcttgctgctggggaagatctggaggtccaagtgctgcaagggtgaggggcgcctggcagggaggtgcgggaccccctctctggccagcctcatgcccctgcgtgcagggcagggcgctccaggtgtctgctcagggtggggactccggcgtgggggtccttgaaactttgcggagctccacttccaaaaacaatgtaaagttgtataaaatcagaggaggaggacccctcgagatgatgggaggcgggtgggtttgttcctgcacagacgccccctcaggttggcagtgtcactgctggttggaagagggggttataagggaggtgacaacccctccctcccaccagttacacccattgttccttccaccatcgactgtggggagaagcagatatgcactcaggaacggcccacgattctcaaggtcttctcttccctgccccttcccagaccccaccccgccccccaaagtgagccctcgtccctcccctgcctgcatgtgtggcaccggtggctgtgatgtggcaggagggcaccagccgggctcaggcgggtatggagctgcctctaaacggaagccggggaaggctggaggggtcccctgtttgcattctggctgccctgctgggggtttggagaagcttggaggctggactcgcggtcgccaacagatccagagccacgaaaggctgccagagcctcctccagccatctttgtccaccggcatcctcgtggtgccctccctgtgcctggcactgggtgtgcagaggcaggagtgagctcaggctcctcgtggggctgaggaggctgagaaggctgagagtgggccccgaaggccctgtggaaggagcagctccgtgctggtcccggaggacgagcaggtgtcaatccaggaagtgtgtgctgtggagggctccggggatgaagaggcatggaggtcaccaagcaccgggcatcccccgggaagggtgggcagccagatttggggtggtctggagggagatgagtccaggagggaggctggtccagatgtgaaagggccttttctgccaggccagggagttgggtctggggagcccttcatggtttgggagccgggaaggggcctggaagggggcctgaacaggttgctttgcaagctttgagagaaaaggcacagagcagggggaggcctggcagggtgggggttggtgcagacatgagcaacagtacggtgtggagggagtggttctaggcctggaggccatttgggtttggggtctctggagagacaggtacagagacagttcaggttcttcctcaggggaggtggccaggaatgctgagtgggggacccggagcagcaggccctggtgaggggagaatcagctccaacctcttcctgcacttttgcagaaggccctgcacggagtgagcaaccatgaccaagaggggacactggtacctggccgctgtctgccagacactgctgggcacctagaatacagcccggacagcagaggcccagccctggtggagctgactttcttttatttattttttatttttattttttaacagagtttcgctttgtccctgaagctgaagtactgtggtgtgatctcggctcactgcaacctccacctcccaggttcaagcgattctcctgcctcagcctcctgagtagctgggattacaggcacgcaccaccacacccggctaatttttgtatttttagtagagacggggtttcgccatgttggccaggctggtcttgaacgcctgacctcaggtgattcacccacctcggcctccgaaagtgctggtgctgggattgtaggcgtgggccactgcgcccacttctttttttttttttttgagacagagttttgttctatcccctaggctggagtgcagtggcgcaatctcggctcactgcaacctctgcctcccaggttcaagctattctcctgcttcagccttccaagtagctgggattacagacgcccgccatcacactcagctaatttttgtatttttagtagagacggggtttcgccatattggccaggctggtctcgaactcctgggctcgagtcacaggtgtgagccaccatgcccggccaagtggtggacctgactttctagtggtaggaagccatcaataaacaatagtcctaggaaactgagcaaatgacacggtttgttggaggccatagtgagtactatgggaacagaaaaagggcagctgggtggcagggatgggcctgtgtgtgcacagagagaagtcagaggtgatggaggcagggcctggtatgacctcaacagacccagccccaaagaccagagacttgggcttcactctcactcctccccttgactcgctgtgtgaccctgggcctgtgttttcccatttgtcaaatgggagtgagggctgcccctggcagtggggtccacctatgcttagtggaccccggagggactctggccagtccaggctcacattgtcctctgtgtcccgggtctccatgtgcagcttcctggtggaaatgattgttttcaaaagtgtgaaaactattgtgctcaagatcaccggggggctgggcacagtggctcacacctgtaatcccagcactttgggatgccaaggcgggtagatcacatgaggtcaggagttcaagaccagcctggcacgtggcgaaaccccgtctccactaaaaatacaaaaaaattatctgagtatggtggcaggtgcctgtaatcccagctactcatgaggctgaggcaggagaatcgcttgaacctgggaggcggaggttgcagtgagctgagattgcaccattgcactccagcctgggcaacaagagcagaactctgtctcaaacaaacaaacaagcaaaacaaaactgaagatcacaagggttcccaaagtgctaaggaaaatgtgagtaaaacccaggggactggcaggctgaggatgaagagaaaagaggggtaggggaaggcccaagcgggtgaccaagcgtcccccaccagggctgcctcccaggcagtccttcgtggggctgagggcttctctgtcaaagtctgtgtgagggctcagtgagatgaacatcaggccatcccagagctggcctcaggtcagtatggcctcccccagtggggttcattacccactgccagccccactgttgccctcaccccggctagtgcacgtgcgcgcgtgctagaccccccagagggactcaggttctcactgagcactgtgtattcctcagctcagtcctgccactctgcatgaggggccgtttggcaggtgaggaatgtgagaccgaggctcgccctaaagccagcacattctccagaatgttagggacttcaggggtgttccttcttgctcattaaaaatgttcccccaggctgggtgcagtggcttacccatgtaatcccagcactttgggaagctgaggcaggaggatcacctgagcccaggaatttgagaccagcttgggcaacatggcaaaatcttgtctctagaaaaaatataaaaattagctgggcatggtagcatgtgcctgtagtcccagctactcaggaggctaaggtaggggggtcatccgagcctgggaggttgaggctgcagtgatctgtgattgtgtcactgcactccagcctgggtgacagagtgagaccctgcctcacaaaaaaagaaaaaaaaatgttctcccaccccaaatgtctggaaccagagggatggttagagaaggcacagttcaggggtacaggggaaccagaccctgaattagacagcacagtagttcccccttatccacggaggatatgttccaagactgccagtggatgcctgaaaccacgggttaaaccaaaccctatatatatactgtttcttccatctgataaccaagactgctgtccgggcacagtggcttacgcctgtaatcccagcactttgggaggccgaagtgggcagtcacttgaggtcaggagttcgagaccagcctggccaacacggtgaaaacccatctctactaaaaacacaaaaattagccgggcatgatggtgggcgcctgtaatcccagccacccgggaggctgaggcaggagaatgacttgaacccgggaggcagacgttgcagtgagtcgagatcgcaccactgcactccagcctgggtgacagagtgagactctgtctcaaaaaataaataaataaataaaaagtggccaaaggacactaaggagcatgacaacaaaatgcagcatggattccgggatggaatccaggaatggaaaaagggcagcagtgggaaaactggtgaaatcagaataaagcctggagttcagtcaacagtgctctactgatgttgatttctttgttttgataaagtactgtcactaaatacgatgtttttttgttttgttttgttttgttttttaagacagagttttgctcttgttgcccaggctggagtgcaatggcacgatctcggctcactgcaacctccacctcctgggttcaagcgattctcctgcctcagcctcccaagtagctggggttacaggcatgagccaccacacctggctaattttgtattttttagtggagatggggtttctccaagttggtcaggcttggtctcaaactcccaacctcaggtgatctgcccgcctcggcctcccaaagtgttggattacaggcatgagccaccgcccccggcccaaatacgatgttaacactagatatagctggatatgtgggattctctgtactgtctttacaactctgttgtaaatctaacattctttcaaaataaaaagttaaaaaaagaaagagaccaaagtgggtcaagaaacagcatttagactgggcgcggtggctcacgcctataatcccaacactgagagaatgaggtaggaggatcacttgggcccaggagtttgagaccaggctgggcgacatagtgaaactctgtctctacaaaaataataataataataattaataataaaatttgccagtctgatggtttgtgtctgtagttaccagctactcgggaggctgagataggagaattgtttgagtccaggagatagaggctgcagtgagctatgattgcaccactgcaccccagcctgggagacagagtaagaccctttctctaaaaagaaaaaaataaaaaagaaagaaacatcatggagagtatgaacccttttttgtcaactcagtgcatccatgtgcatcatatgtgtacacataggtgtcatgtgtgtacatgttcacaaagatatggaaggatgaacactaggggtttggaatatttttatctttgcatctttgtatattgtttgatttttgttttgcaaagagtaaatataggcataacttttgtaactagaaaaaaggctttttggctgggcgtggtgggtcatgcctgtaatcccagcactttgggaggccaaggcgggcagatcacttgaagtcagaagtttgagaccagccatgaccaacctggcgaaactccgtctctactaaaaattcaaaaattagccaggcgtggtggcaggcacctgtaatcccagctacttcggaggctgaggcaggagaatcacttgaacccaggaggcagaggttgtggtgagccgagatcacgccactgcactccagcctgggcaacagagtgagactccatctcaaaaaaagaaaaaagaaaaaagaaaaaaggctttttaaatcttacagtttgaaaaataaaatagaatgctcccctggccctgaaccttcctctgcctgctctggtctccctggtgaatcaacaccttgtaaagtcagtgagttgttcctcctaagactgagctttggggactgtcagtggaactctgggggtggagtgaagagaagcctcaacaacccccaccaagcccgactcacaccacccccgacatcctccccagagcaagagcccaggcaggcacacgcagggggactgggaactcggtgttcgtgtctttatttggagactgggagacagattacagtttaatgagaggaacgacgactcaagtgatccgatgggaagggtgagtttcctggcccttagggagcgacagtgccctggacaggaggtctttgagtgggagtggacactctagaggcctccccagctccaggctgtgcacctcttgagggtgggcaggcttgggagtctgtgtcctcattgtctcctgtctacccttggccacaggcatctctgggaagagccagatcctgtttgctctcgtcttcaccaccaggtacctggacctgttcaccaacttcatctccatctacaacacagtaatgaaggtgaggggctgggtgatgatggttgggggaagccaccaagcccccacaaactgtgaggtagcctgcttggaaactcattctgtggagccaggccgacctgggtttgaatcctgactttgctgcttagtggctgcaagacctcatcttgggcctctttgtatgtcagtgtcctcgtgcaaaaatgaggacagggctgggcactgtggctcatgcctgtaatcccagcaatttgggaggccgagtcgggcggatggagaccatcctggctaacaaggtgaaaccctgtctctactaaaaatacaaaaaattagccgggcgtggtggctcatgcctgcagtcccagctactcaggaggctgaggcaggagagttgcttgaacttgggaggcggaggttgcagtgagccgagatcgcgccactgcactccaccctgggtgacagagtgagactctgtctcaaaaaaaaaaaaaaaaaaaaaaaaaagacagtaccattacttagctcagagggtttggttgggaacattaaatgagataataaatgtaaatgtaaaaaaccctgccatatattaaacattcaataaagggtcacacctgtaatcccagcactttgggaggccaaggcgagaggaccgcttgagctcaggagtctgagaccagcctgggcaatgcagtgagactccgcctctacataaaatttaagaaatttagctgggcgtagtggtgctcatctgtggtcccagctactcaggaggctgaggtgggacaatcacctgatcttggtagatcaaggctgcagtgagccatgatcatgccactgtactccagtctgggcaacagagtgagatcccgtctcaagaaaaaaaaaattatttaggtgatagagaaggattagagagctacttcagggagtgtggtcagggcatcttcaaagagatgacatgtaagctgacagcttagtgacaacaaggaaccagccatgtaaagatcaaaggacacaccttctttctgtttttttaagacggagtctcactgttttctgttgcccaggctggagtgcagcagcgcaatctcagctcactgcagcctccacctcctggtttcaagccgggagcttgccttgtgcctcagcctcccaagtagctgggactacaggcatgtgccaccatgtccagctaatttttgtatttttaggagagacagggtttctccatgttggccaggctggtctcacgctcctgacctcaagtggtccacccacctcgacctcccaaagtgctgggattatgggtgtgagccaccatgcccagccaagatgtagattttagttggacacattatctaataggaatcttatttcttgtgcagtggtgcgatcatggctcactgcctcaacttcccgggctgaaggggtcctcccacctcagactcctgagtagctgggactacaggcacgcaccaccatgcctggctaatttttttgtatttttaatagagacaagatttcaccatgttgcccaggctggtctcaaacccctgggctcaagtgatctgcctgtgtcagtctcccgaagttctggaattaccatgatcagctaggagtcttttttttttttgagacggagtctcgctctgtcgcccaggctggagtgcagtggggcaatctcggctcactgcaagctccgcctcccgggttcacgccattctcctgcctcagcctcccgagtagctgggactacaggcgcctgccactgcgcccagctaagttttgtatttttagtagagacagggtttcaccttattagccaggatggtctcgatctcctgaccttgttatctgcccgcctcggcctcccgaagtgctgggattacaggtgtgagccattgcgcccggccaggagtcttcttttttgttgttgttgaaatggagtcttgcactgtggctcaggctggggtgcagtggtgcaatctcggctcactgcaacctctgcctcctggattcaagcaattctcctacctcagcctccagagtagctgggattacaggcacccaccaccacgcccggctactttttgtattttttgatagagacggggtttcactatgttggccaggctggtctcaaactcctgacctcgtgatctgcccaccttggccccccaaagtgttggaattacaggcgtgagccaccacacctggcccccccttttttttttttttttgagacagagtggagtgcagtggcacgatcttggctcactgcagtctctgctcccgggttcaagttatttatttatttattgtttagacagaatctagctctgtcgcccagggtggagtgcagtggcgcgatctcggctcattgcaacctccacctcccaagttcaagagattctgcctcagcctcccgagtagctgggattacagatgtgtgccaccatgcctggctaacttttttttttttttttttgtatttttaataaagacggggtttcaccatgttagccaggatggtctcctgacctcgtgatctgcccacctcggcctcccaaagtgttgggattacaggcattagccaccatgcccagtcttttttattttgagacagtctccctctgttgcccaggctggagtgcagtggtgtgatctcggctcattgcaacctccgcctcccaggttcaagcgaattctcctgcctcagcctcctgagtagctgggattacaggtgcacaccaccatgcctggctaatttttgtatttttagtagagacggggtttcactatgttggccgggctggtctcgaactcctgacctcgtgatccaccctcctcggcctcccaaagtgctgggattacaggcgagagccaccgtgcctggcctaggaatcttatttctaaggaacaagggttccatgggggaattctatcttgcagggctattgagaagatcacatgagataacatacagcacctagaaaatatttaactaaagtgagttgtccttttcttccatatcagagacatccctttgggatttcaggcatgttgttactagttggtagagtggaggttgctgttacttgtgaggtgttgaactcattcagatttagtgaatgtgaatctgaggactggaaatcaccgtctacttaagttcacacatgtatcaaacatcacctgctagttcatttctcagcccaagtcagccttgggcattcctggcagagacagcagactcagcccttgccatagctgaatgaggtctaggaagctcaaagaggctagtttctacatttatgaaatgaaaaagtgaccacctcattcactcattccagcatttgttttgtgccagggactgagttaggagctggggattaggaggtggaccttgccacggagtcctctcttagaggggagatggacttgtacctagacatttacagagcatgtgatcacgggctaaaatgagtatgttcacatggagctatggcgacagaatgtgtgcctcattgtagtgaaaaaaagactgcttcgaggaaataactccaaataggagtacaaataggagtgctctaggccagtgtggtcctgctccggcagtatcagcgtcacttgggaaacttgttagaaatacaaacttttaaggctgggctcggtggctcatgcctataatcccagcactttgggaggccgaggcgggcggatcacctgaggtgaggagttcgagacaagcctgaccaacatggtgaaactaaaaatataaaaattagccgggcatggtggtgcacgcctgtaatcccagctactcaggaggctgaggcaggagaatcacttgaatccaggaggcggaggttgcagtgagacaagactgcaccactgcactccagcctgggcgacagagcgagactccatctcaaaaaaaaaaaaaaaaaggaagaacaaactttcaggcccatccagacctatgaaatcaaaagctcttggggcaagggaagagacagcatctgtgattttttttttttttttttttttttttttttgagacagagtctcactcttatcccccaggctggagtacaatggcatgatctcggctcactgcaacctctgcctcccgggttcaagcgattctcctgcctcagcctcccaggtagctgggattacaggcgcccgcatgcatgcctggctagtttttttatttttagtagaaacagggtttcaccatgttggccaggctggtctcaaactcttgacctcaggtgatctgcccaccttggcctcccaaggtgctgggattacaggtgtgagcctccacacccaggcagcatctgtgttttgatgcacactcatttgagaagtgctggcctggaaggttggaggccatatcaaaatgaaatcattatatgccagaggacagctactgtgattaggagagcttttctgaaggagcaatggtcagttagttcaagggatgttagcaggccataagtagtcccagcttctagggaggctggagcaggaggatcactcgaccccagggtttgaggccagactgggcaacatttaaaaaaaaaaaggctagtccttgtggaagaatgctcagaagtcactgatgcatatccaggaaattgttttaaaattgtttcaagagccctggaatgcctctggtaaatcccctgaaatagaccaatcctgtttcacctaatgctccacaaatgaaggggacgacaagggcacctttgttcatggcagcactgtcagtcccagtatagaagcatggagttatttaatgaaagggtcactgatttcaaattctaggcaactggacccaagataaattgcaaacacatttaacctcttcatgttacattatggcagaacactgacccttaggtttggtaggctaggagcgtagtaaataggccgggaaatgacttcatagattcgattcccatgtctctctccccttttaggtggtttttctcctctgtgcctatgttacagtgtacatgatatatgggaaattccgtaaaacttttgacagtgagaatgacacattccgcctggagtttcttctggtcccagtcattggcctttccttccttgaaaactacagtttcactctgctggaggtaagggaatggactgagtaccagttctcaaagggaaatatgctccctgcatccttccctccagaccctgggcttgccttctgcttacaactgtgaccattactcatgtatctttcagttataagttgagaagaaattgacaagctatttacaatgctttagttggaaatgagcacatctcaatagtcatgatgcccataaaccaagcaggcatcacagccctacttctggctgttgagacgttctgttcaaccgattagcagatccctgtatccctgtagcacagtccaggcccagaaatttcaactcagtaagtttggactgtggcccatgaatctgcaggcaacaagcatcatgggagattctgatgctggtgtttatggacatgactaattttttattatttttttgagatggagtctcactctgttgcccaggctggagtgcagtggcaggatctcagctcactgcaacctctgcctcctgggttcaggtgattctcctgtctcagcttcccaagtaactgggattataggcacgagccaccacactcagctaatttttgtatttttagttgagacggggtttcaccatgttggccaggctggtctccaactcctgacctcaagtgatccacccacctcggcctcccaaagttctcggattataggtgtgagcctggcaacatgactagattttaagaaactgtggcttcaattatgattttatactatgaaactatcatttaagttatttttggccgggcacggtggctcatgaggtcaggagatcgagaccatcctggctaacacagtgaaaccctgtctctactgaaaaatagaaaaaaaaaaattagccgagcgtggtggcaggcgcctgtagtctcagctactcgggaggctgagacaggagaatggagtgaacccaggaggtggagcttgcagtgagccgagatcgcaccactgcactccagcctgggagacagagcgagactccatctcaaaaaaataaataaaaaagttatttttggctgggtgtagtggcacatgcctgtatgtagtcccagctactaaggaaggtgagatggaaagatcacttgagcccaggagtttgagactgcagcaagctatgatcatgccactgcactccagcctgggtgacaacagcaagaccctatcttaaaaaaaaaaaaattaaaagtagttttctatataaatgctcacgctacactgtgaaaaaagcagtgtactgtataatctttcaaaaattagaaaaaaaaacccttatatttacctagagatggtaggttaaactgattaaaatattataatttttattgagaactttttccctccttactgtaccttctccagcaagctattgttttagtaattatgttcttttaagatgggcctcttcttggtcttgctcagtctctggttgctttctctttggctcagatcctctggactttctctatctatctggaatcagtggctatcctgccccagctcttcatgatcagcaagactggagaggctgagaccataactactcactacctgttctttctgggtctgtaccgggcactctacctggctaactggatcaggcggtaccagactgagaatttctatgaccaaattgcagtcgtgtctggagtagtacaaaccatcttctactgtgacttcttctacttgtatgtgaccaaaggtaggtcctgggatgacagcaatgctgacactggcctaaggagttactcatccatttaataagtattccagcagatacagatgtgaacagtcaagtctctgccatccacaatgcttgtgttctaatgcaagaagacaaatattttcaataaagaaacaaatgccataaaaacatgcaggccaataggttatgtgtactatgcaagacagctgtgagatgacatttgacagaatacttggttagtagtgaaaaacattccagaacttattacaagccccaaggcaaccaccagcttggtgtgatggacaaaaagcctagtggggtcaaaatctataaacctggagatgagtcaaccaagaccagttcacatagggcaggggtgtccaaccttttggctgccctggcccacactgaagaattgtcgtgggccacacataaaatacactgatagcttatgagcaaaaacaaacaaaaagacacttcatatgttttaagaaagtttacaaattcgtgttgggccacaaagccatcctgagccgcgggttggacaagcttgacctagcgcctcgtaggccagggtaaggggcttgcactacattctgattgccaagggcaggtattgggtcattaaaaaacccaatccactagctgctatgtagggtagaaagcagtccaagtacagtgactagctatggggcagttgcagttgatcaggaaaaaggctctaggtagaaagacatgtggacacaagttctaggacttgagaaggactgctgatttgattgtatgagatgtacaatagacaatttgaggccaatcgctaagtttacagctggggggaagggtgccagtaaccaagtcggggatcagtaggtccatagtcaaccggagatggactccccctttgctttaacaatcgaacatatactgtgagccggccattaagagatgataccaagattatgcatcaagttataaagcagtcctttcatcagatggtaaattcttatttcatctccattttcttccagtccttaagggaaagaagttaagtcttccaatgccaatctgaggaccttcagagacagtctacgccttaacaagcacatgaaggaaactattttgaatgttctctttggcaacttatccataatttgggatcaaatgttaaaaccagaaaagtgtttagtgtggatttcagcaaaacctgatcatcccacccagaagaccttctcatcaatagatcgcccttaaagacccattgtaaggtcataaaaaacctcggccacctgcacaaagatggtgcctcactgcaacaagaaaccttaaggtgtcttaccgacgaaataaaaaacataaatgattgttctccaaggcctgagggcaagactcatgatgagcaagtcaaccccaatctggaacaatgtccctcctcttagaatgtcccaactaaagaccagttaaaatattagggtacgttcttgtgaatttccactttccaggtagatgaccaaatttaggtggtcaagatataaaggtgtcagctagttttaagtgtgaaacttatttcactttcacactgccttcaggccagaagcaaaccaaatttaccaggtttggctggaggagttttgtgactcatcttttactggtttgaattttttcaaaccagtggctgatacctgccttgtacttagtaccttaataccaataacctaatggtacttaggcgagtaccatttgcacaatcactgttttacttatgagcagatacagatatatccaaacccttacctactaggtatcctgctagggttttcaattccaattcttgtattaagttttttcctttcagttttaggtgcgaaagtaatcagtcaatccaatatcccccatctttgtcttgaaacaaaaactgttttaagacgtctacgttgaattattcagagaattaagcaataaaagctcacaccttattgtcaacagtgtttttatttatacctacaaaaagaaaacaagatgatggtatcaaaaggacaatttacaaactaagaatagtaacatagctttcagcatcctgtgcctgaacatcacacatctacaagtctttcaagtcttaatgcaacaggaatgtgtctggagaccagcaagaacatcaatagagagcactgatcccaagcaaaagccactaaccttttagatgagaagtccacacaacgaattgttagggaggattggggagaagcagcccattgcttaatacattggaaccctttccctaagttgagtttcaaccatgaatgcaataactagcataaaacgattcttctgctcatgttctgaagccaacagcagaacctgaattataagtgacagacatggaggcagaagagttaaactctgctagatttcagctgtgctcaggccataatagtttttgaggtttggaatttactgttattttatgattacaatgtcccaggtggaaaaagggaagcaagcaatccaaataaccacttgcttgcccagagacctttccctcaaacagatgctttcaagagctgcgagagagtagggcatcccttgtggtggtacctctatgtttaaagaaagaagaaaaaaacccagaatttggttgtagaaaacaatgcccacaacagactggccagtgcttagacaaatttggggttggggggaacactttggtttgaaagcacagagcagtttgccatgtttcttctgtgcctaccattctcccttggcctcaacttctgtaagatgggggggggacaaaaagagaagtaaagttaagaagaaagtggaaaattaaaaaaaaagatgtcaaagtttttacatgcatatatttcagcttatgctgaagacctacctgtatgttgcacattgaatcatactttcagaacccctcagaaaccatccctctctccctaaagaattttaaaaggaaaacaaaacctcgagtatagatcttacagatgagcaagcattcaggccttagccaaagaatgcagtggagccttcccccttcaactgcattgtgaatgaataccaattaacagcataaaaattaatagtcccatatcagatctggaaggggtttctggggctgtctgatgtccctatcctgttgtagtgaacacaatagcagaaaattctttctgggtccatctgctataaagtcttggtaaaacagcattaccatgaagaggatgaactcacctaccttcagatggaggaaaagtgaaaaggacttaggctttagtcctccatgacttttcttaagcactacctacctgtaataagctgagtgcaaaaggatgccgaagaaaatctgcacccagaagctgttagaaagcactgcagagaacagggtatgaagaaaataaagagttcttaataaacccttaagattctttgttcaaggtaactttgccaaaagggcagagtaggtggcaaagagttgcttttaatctagctctacactgcatttgaaaataaaatttgcccattttgaatatattgtttataattaaatgtgctttttacactgcaggtcaatataaaaactggttagtaaatttccagcgagcatttatgttcatttgctcacagcagctgtctggatggaaaattaatttcacagatggtccccagttaaactgggaagaaatataggcagcttccacccagatgctgagatgctacagtttaaccactacaataaacacttgtggtttttaatttaaaggatacacaaaactcagcaattcaatttctagcctgacactaaaatggttatttttcagtaacggggggagaagtggggaggcagagtgtgaagggaaataaaaccaattagtaatttttaactatcaaatgcactccagcaatcagtcaaaacaggcccgaggaaacctgttccaacttaagaaacatttaaaagcacaaaagaaaatgtgcagggcaatccctctttgttttctaacccagtaatgagaaatttaaagcacagatgccatcttcctctgcaaaacaattcagccctccccctccctccctccccaccaactcagaaaaacaaaacatggggctcccacaaaagggcctaataccttactcttttagatgaaaaatagctcaaatatcttcaacatgcaagaagttgggggaagaaattaatctcttccagtcagctatatatatatatatatattttttttttttttacaaaatgttattccagactggatcattttggtgggcagaagaaacctggcagtgaattctaactaatctgcatgaaaagacaaatcacgatggttggggggaaaaattaaaaaaaaaaaaagaaaaaaggaaaaaaaaagaaaaggcgaagaggaaaaaaaaaggaaagacagtgttccttaaaatgtaattaagtctgctggagtcactaccacttgagtggtttcatttacgtgaaggaggaggagggggaggaggaggagggtattggtaggcagtctgccccatgtaacctatcatattggtagctcccggaggctgtgcaaactgttgtgacatcagtggctgtggctgctgcccagaccggcctatcccactaaactgctggctagagctctgtgaacttctcccagttgaggtggtgctactagctccataagtgccagcaccatattcttgagctgtatagctactggtgccataagcagctgccccataggtgccttgaccataggtgtattggcctgcttgtgctccaaaggcagaatttggacttccatagccactgccattagcataaccagctctatcggtttcactacgatcccgatagcttgcagagtctctccggccaccatccttgactcctcgaagccttcggtcacactcatcctgatacatcagattgggattgttggctgaagaagtggtccggtaacgagaacgaccacctaatgggaagatacaagaagatttttaatggcagatataggacctaaacataacaatgtaaaaattctactgggtacaaaagtattaaacatgtctccttgatatttagttatgctggccagcctcccaattagtactgtaaaaatatactcataatttgattctttaatggggcacattcaaaagcacagtaaaaattaaaggacactagaccttttcacccttttaggccccttacttgaggatgatcaagaaacacggtattacaatatgaaaccttgagtcaggaagcccagatcctaggatattctgcaactgtagatgcaactgctatgtctcagtttctacccaccactaaacagtgtaaaatgactgacctctccgtatggaaaactggaaacctaatatactactaagcatttttgaaagtattaaaaaagcaaccatgaccgggggcacactggctcactctcgtaatcccagcactttgggagatcaaggcaggagggtcacttgaggtcagcagttcaagaccagccaacatggtgaaaccctgtctctacaaaaaatacaaaaattagctggacatggtggcacatacctgtagtaccagctacttgggaggctgaagcaggagaatcacttgaacccaggaggcagaggttgaagtgagccgagatcgtgccactgcactccagtctgggcaacagagtgagactgtctctgcccccgccccgccaaagcaaccacattaaaactcagaccagcctcagctaggtttggtggctcactcctgtaatctcagcactttgggaggccaagacaggtggatcaccagaggtcaggagttcgagaccagccaggccaacatggtgaaactccacagaccagcctcagctaggtttggtggctcactcctgtaatctcagcactttgggaggccaagacaggtggatcaccagaggtcaggagttcgagaccagccaggccaacatggtgaaactccacctctactaaaaatacaaaaattagcagggtgtgctggcgggtgcctgtaatcccagctacttgggaggctgaggcaggagaatcacttgaacctgggaggcagaggttgcaatgagctgagatcgcgccattgcacttcagcctgggcgacagagcaagactccgtctcaaaacaaacaaacaaacaaaaccaaacctcagaccagtctctaagaaaaaaaaattcacaatttagcttaactaataggactatcacaacaaacttcacgttttcttagttgaaaaaggttataaaaagcattaggcagtgtcctttgctattaagcaacatacttacagccttcttaaaaacagcaactaaaagcaagtcacagaaggcgtaaagagataccttggcagtacctggaaaactccaggacttacccttacccccgcctccgccgcctcctctgtggtccacaagctgcatcagttttggattgatagcctgattggcctcttccagcactttgataagctctctggcctgttttaggttccctggggtgaagaaggtataggcggtacccttgttggtgctacgggctgttcggccaatacggtgcacataatcctctgagctgtttggatagtcatagttgatcacaaacttgacatcttccacatcttccacgtcaatgatgagtcagtgtgtaggttgatgtggcagggaaagagaaggtaaaggacatgccaacaacaggtgggaagcacgaatgcagatgacagcaagaggaaagaaggtgaagttagtaaccactctgaacagaaacaaaaaaagactcatcccaacagagtaaaagaggattactgattcctgggacatgcataggaaataggatctttattggctgtagaatcctaagggaatcccatccaaacatccaaactcctgcctctgctacattttaccaatatactgacaggagttacaccaatattggtcttcagacgcaaattccagtactatcctttacaaaaccagaacatagaacaaagtggtaaaccactgtgaagttatgaggccaaatcacttctactctgttgggagaagcctggcaaaatctaccaacaacataacaaacttacctttaaaccagtcacagagcaaagtaaaaaaaggagcttcatatattttattactacaatttaaaggaaacttaaatgttttgattaacatttaactttttttgctcttatctttttaagaaactgagtagagccaaagctgttaagtacacacctattttcctttgcagaaacatccagattatctatcccctttcaattacaagagcacattacactaaaattttactgtactaccaagcccagcttctgccaaaatgaggatatttttgctcaactcaaggttatttcaactcaggacttgtttcaattatcaatgattgtctacgtgacctgggaaattaaattaatagccaaagaacgtgggaaaaccatgaaaccttgagacacaagtttagtattctctctactgctgggaattgggctgaataacctcctaaggcttaaaatgtaaatgttagtgtaatgctttcagctgaatgtatatttttacctacttaaacaaacaattttaagaatataacaaagaatcctactgttttgtggaaaaaaatctgcattttacaaagaatattcagaaaatatcctagataaaacacagatttttgtgatataaataattaaaaaacattctctgtttgttaccagaccgatgcacactccctcctcctttgggaaaccgctgcagccgatcccgtctctttgccttttatttttggcggcctcctttcgaaaactccgccttctgacacgggaccactggagcgcggggagcatgcatcaagggtccgtggcagtgagaagtccccacacacgctcgctctgtgaactggcttagatgcttctctgtagccccatttggttgccaagcgccggagaacctgggttcgggtaaaaatttcaggtcctccaacgcctcccccaaggataattggggtgattgtagaaaaaaataattaataaaaaaaaatgtaagttacatccaaagggtcagactgcatctattgcccagactggattaatttcaagggagaaaggggagattaaaaaaaaaaaattagctgttgttacagggcttgtgaagaaggggcattatgtctgtttcttattacaataaaggctcctcggtctttactgacccctaaagtcctgaatcacaccagaaagacgagaaggcacttatcacagggggcagcttgagtctccggctagggtcgttgacgcaacaaaggaaaaaagaatttacagggccagggtggatgtaagacagggggtggggaattctactccatggtatcttcagagctaggataatgctccttatgcaatcccactgcatatgaccatggcagtagaacaagttcaattactacactggatgcgttaagtgtgctttcctagcagaaagcaccagggtggagtcaacagttcacatgctaatacttggaagtatttctagaagggggtgctcaatagagggcagacatgatgcaagttcttcatactagaaaggtgtcctgtgtgtgcatgcacagctggatgggggcacacaggagcaagcgcagaatttggttttctccagtcaagtctaccctgatgttatctgtgcactgccacaatattatcttgctgcctttctagaagatgctgtagcagggtaagaaatccaaagttaatgttttggccagctgactgggataagaaccttttgtctgaaaggccctatgacatggcctgaatcgccaatcactaataaggagggactaagtctagccaagaggctcatctagagctgcttccggccaatgtagatttgtctcggccatgtattgagtgatctgcagctgatatcaaagcttctgttaaaaaacaaaacaaaataaattcaatacttttagtttaacagtgtgtagttcaaacaaaaaaaaggaaaaataaaaaatatcccagtggaaagggaagtggtagcctaaggatgactattataaaattatgggaatcaaagaacttacctgaagggaacatttaagagaccatcgcttgacaggaagtgaaaaaaggccctggtgactcagctgaaaattgcacccctgtctatgaggtagaagccttcactttccaggatcttgtaggacattggtcagaattctgccattttggtgggttttctccctcttttgattttttacaaggcagcaaacaaaggggcccaaaacaagcactgatgttgagtaacaagaaacagactcgggtaccttccctctcccctcacttggatgagtgggggtgggatgaagagtctaagttattctaatggtagccaattaatttggtttagaaatgcaaggggacatggagcaaatatttttaattgtctaggcaagatgcacaaagaagctaccagcacatagcaagcctgtttaaaaaccaaccattactgaaagctttatgtaaactgctttcaggcctccgcctcctctcccaacaggcccaagttctaatggcacagatccagacatgacctcagagggcagaggggcagagagaactttccatcatggctgcaggtcaccacctctgaaggagggaatgatgagtgcaatgcataaaaaggcttcattacttttgtattccagtttgaatacctgttctctttatattatatagtataagggaataatatggtacttctcaccttactgggcaaattaaatacctgtcaataatttaaggatttccttgtaatacaaataatctttttttttaaaatatagaagttctgagttagacctgtttagctcagaatagtgggctaaactaccataaaattctctgtatatcttaaatggtaatgggtcaaaaactccagaaaatcatcagttgataacacacctacagataagtgcatgggtaggaggggatagccaagtgcccatgataatttgacctcagtaaattaaactgggcaatacacatatttgctattctgatactgcattagacttataaaattccatctaataagcattcataaaactggacctctctgtatatatctagcttagacagggatagggaaaagaataactgaagaaactagcttacaatagctaggtttcgtcaggcttattctatccagccagaaaccaccaccagagagaagctgagccattcagctgtctgtctcctctccctctgtttgaatagtcatgcctaggccttgctgcagaccaaagcctgtttgttaggagcaggaagagactttgaaaataaaaggggggtgggggaaaccaaagttaaaaaaaattgtggggggggcagggaatggggagaatcacgctttgtatttttttctttcaaatatttatctaaccacatgtatatacaactttctaaacttgaagtctgaatttgaaatgacgaatctttaaaccaaaagatacatataccattgacagagacacctatctatacaaacctagcccacgggaggctacatctgtagcaataaggatgggtgcctttccagaacggaactctgtaaaaacaaacaataatcatcatcaaataagcattccttgctatctgatctgtttacataaccatgttaaaatttcaaataatggtgccagaaaatcccaagctcttgtaatgactgacagtgattcttttgaaaatctttattacactcatattcagcagcacaatagttacctctactaataatgaaataccgttaagagagtgtggcaatttgttacataattaatatgagctagatttttttccccttaaagttatttcccaaatgagacacaaccaaaagttgggggtcagtaggaaacaagttcaaaagatgtagaatgaaaagaactgaatttccccccaaaaggtatgcatattatttatttttctttcttttttttgagatggagtttcgctcttattgccgaggctggagtgcagtggcgcaatctcagctcaccgcaacctccacctcccgggttcaagcgattctcctgcctcagtctcccaaatagctgggattacaggcatatgccaccatgcccggctaattttgtatttttagtagagacggggtttctccatgttggtcaggctggtctcgaactcccaacctcaggtgatccgcccacctcagcctcccaaagtgctgggattacaggcgtgagccactgtgtccggccacattttatttcttaaacaaaatatggcctcttccatttctcaatggcttcccttaagagtagtcctgaaaaaaaggactgaaaggaaatatgctaaaatatgactcattaagaaacatttttctttaaatatttcagtaacagtttaattctccccaaacggtagttatatttttataatcagaaggaaaaaattgaagactttattaataaagggagggtggtgaaagttgtgaaaaagtttaaagagccagcatcgtggcccttaaagaaccatgagcacacgctaaaagtaccctcagtaattcaatcaactatacaacaggggtaagacaaactggcctttgggccaaatctggcacaacgcctatttttgcaaataaatattgtctgaacatagccacgtttatctctttgagacagggtcccaccctgtcacccaggctggagtggcacgatcttggctcactccaacctgtctcctagactcaagcaatcctcccacctcaatctccggagtcgctggggttacaggcgtgcaccaccaagcttggctaagttttgttttgttttgtttttcttttagagacaggatttcactatgttgcccagaccggtcttgaactcctgggcctaggtgatccacgcgcctcagcctcccaaagtgttaggattataggcatgagccaccaacggtgcccagtccaggccacttctttacatattatctacagcctacagcttttgtcctaaaacagcagtgctgagtggctataacagagaccaccatttggtttacaaagccaagcatacttactatgtggccctttacagaaagtttgcctatccctgaaatagagcatgaacattcacttatgggcagggggtggggaatcaacagaaaatgcttagttttaaacttaccattaagtacccaatctctttctggttgactcttgtctccatggatacacatagctggccaactatcagaagaaaagtgaccaatattttaaaaatcttttaaagtggagaaaatcgaactttaaagccaaatgctatcatgcaatttttgtaaggtttgtcaggcttcatgaatagatgactgtgctcattaaaagagcaaactgcatggataggcattattgaaatattacacaacatttggaataccaatttagaaatttccagttaactataaaaccagaggttaattgccttggtgctatactcacccatctctgcgcatccttcgagtcagatcatcacagcgtctctttgtctccacaaatattattgttttgttttccttttcagccattatttcttccattagttggatcaacctgaaaacatgaccaacaatgcagtcatcacacagaaagttattatgtggacgattatgtctgcaatatcaactcccaaggctacagtactttctttgcacattacgcttttaaaatttttaataactattagagtactgagtcaggttctgctatgtgctcaagaaatactaactcataccatcctcacagcaagtctcatgtaagtggtattactcccatttcacagatgaagaaactgcagcaccaagacacaaaattgtgcaaaattatacagcttgtaatcagcagagctaaatttcaaactcaagaattcagaatccttgcatttaaccataatgctctgacaaatgatatgatgatggattatcagaaacctagcaatgcttttaatgttctcaggcctcaaaatatactggtttctacagtactaattttggagggttattagaaaaggtttatcagcattatcaaatcagagtaaaatatctttcatacttgtggtctttttcactttccatgcagacatccactatctggaggatgttgtggttggcactcaactccagattgcctacgttgatctgggtgtaatcacgaaggaaatcctctgcaagctgtcttacttcttttggccaggttgcactccacatcagtgtctgcctatcaggctatcaaaaaaggaaaggctttctttcaggctaaggaacttggacaaatggcataaagactgcttattattagctttacacaccctgatttggtcaacaattttacggatctggggttcaaaccccatatcaagcattctgtcagcttcgtccaatacaaggtaagtacatcggcgaagatttgtctttcctgactccaggaaatctatcagacgtccaggagtggctatgcagatctcaacacctgtaaaacaaaaccaatgatcgagccaatcgactaggtgcagtggctcacagctgtgttctagcactttgggaagaggaggcgggaagatcgcttgaggccagttcacaaccagcctggtcaacatagcaagaccccgactctacaaaaatgcagcagcagcagccctggtggctgtactcaatgctgcagagaagctatttttttttttttttttgagatggagtcttgctctgtcacccagactggaatgcagtggcacgatctcggctcactgcaagctccgactcccaggttcacgccattctcctgcctcagcctccccagtagctgggactgcaggcacctgccaccacgcctggctaatttttcgtatttttagtagagacggggtttcaccatgttagccaggatggtcccaatctctggacctcgtgatccgcccacctcggcctcccaaagtgctgggattacaggcatgagccaccgcactggcccagagaagctaaattttaacaaagtaaccgcaaaaccatgtcaggacttatgtacaatcaccaaatcctcacaaagtttccagccatgctgaaccttctctctcaaaatagctgttttagtcacatctgagaatttctaagctgctgaaattctgagtttatcacaagaacccactttttttctccaatttcctccacaggaattggtaaagtaagataaactaacaattcttttacactatatattattacctctttccaagtctcgaatctggggacctttaggagcacctccataaatacaagtactcttcaatctagaacatttgccatagtcatcggccacctgctgtacttgctgggcaagctctctggtaggagccagaactagacactgaaaccaacaaaaagacacttgagacctcatccaaggtttaaaaaaaaaaaaaaaaaaaagaagaaacaaaatacaaaaagctaatttaattctttgctgtctaatctagcacattaaaagtgatggggtgaagatcagaagtggggaatattagcacaatggaatatagaaaaaaattattagaacttcatgtttagcatttggaatgatactggtatcctcgtcacttttactatgacacattatcaatcattatagtttatatatactgtttaagtggagatatagattgtattacctggttttaagtatacaactctcatttacaggttgagcatcctaaacccccaaaaccaaaatgctccagcaagcatttactttgaggatcatattggtcctcaaaatttggatttgttttgttttctgagacaaagtctcactctatcgcccaggctggagtgcagtggtgcaatgaaggctcactgtaacctctgcttcctgggttcaaatgattctcctgcgcctcagcctcctgagtagctgggactagaggcaggcaccaccatgcccagctaattattgtatttttgtagagatgggggtttccccatgttggccaggctagtctcgaactcctgacttcatgtgatctgcccactttggcctcccaaagtgctgggattacaggtgtgagccaccatgcctggcctaaaatttggaattttggatggtcatcctgacttaaactggcagaatgacacattcctgacctctaatttaagcacatcaccaggtagataaggcaaaaacaatgaaaatttacatgtaatctgacaagactgtgtacaatctggccaaataatacaaaaatcaaggtatcatataccattcaaattaaattatgaaacttgctttatatactgatccattagatatcaactaataataatgctgtcagacatatactatgtattataagtactgcattatttctttttgtgaatatcttgagacatattgtacatgttcataaatatataggacaaatgcaagcttatttcttaaaaaagttaagtaggccgggcgtggtggctcacacctgtaatcccattattttgggaggccgaggcagatcacctgaggtcaggagttcgagaccagtctggccaacatggtgaaaccccgtctctactaaaaatacaaaaattagctgggtgtggcggcgcatgcctgtaatcccagctgcttgggaagccgagacaggagaatcgcttgaagccaggaggtggaggttgcaatgagccgagattgtgccaatgtactccagcgtgggcaaccaagagcgaaactccatctcaaaaaaaaaaaaaaaaaaaaaaaaagtacacattcaatgccaggcgcggtggctcacacctgtaatcccagcaccttggggaggccgaggcaggcagatcacctgaggtcaggagttccagaccagcctggccaacatggtgcaaacctgtctctactaaaaatacaaacattagctgggagtggtggtgcacgcctttaatcccagctactcgggaggctgaggcaggagaatggcttgaacctggcaggcggaggttgcagtgagctgagatctcgctactgcactccagcctgggcaacaagagtgagaatatatctccaaaaaaaaaaaaaaaaaagaaagaaggctggacgcagtggctcatgcctgtaatcccagcaatttgggagggcaaggtgggctgatcacctcaggtcaggagtttgagaccagcctgaccaacacggagcgaacctccatctcaaaaaaacacaaaaaatcaaaacaaaaaaacaaaaaaaaccacaccaaaaccagaaaacacttgatttactgcacagtaaatgcccatacagcatgcatggtttctttaagagtaagactttggttcaaatgtaagctcagctattcaattgctgagtgatcttgggtaagtcatttaattccaagtaagatgagaatgaaaccatttccacctatggagggtgtggttaagagtacaaatggataatgtaaagcaccaagcctaaatagtcgctaaattgtagtttttcttagaattacaaagaaactgaaacacacttacgattgggccatctcccctttccaagtatggctggtggttaatatgaacaattgcaggcaggagatactgtggaggggggaaagaatgacaaccttacgcttagaagtacaatcttacttagatacttagtaattactgaattaatgcataaataggaaagtgaaaaacagaacttaccactgctatatacaggaagcaatacaaatttgaacataaaatgcttccatatatttaataactaaaatagtatctaactatctgaatggcacttctacgaagaactgagaacgtatgacaactagaatagcaaaataagttaccacaatatcaaggatcttctcttgctcatacataccgccaacgtcttcccagagccagtctgagcaatgcccaccatatcccggccactaagagccaacggaaatccctggcactgaattggagttggttctgtaaagtgctgatccatcaacacatccattacatattctgtaagagaattttattttgcgtattttattgtgtttaaagacacaaaccaagagtttttaaaaaaacttttaagctcactgaagataagatttacccagcttcatctctccaaagtgctttttctttatctactagatctccgaccaactcactgttagcttctaagggccaggctaggtggctcacgcctgtaatcccatcactttgggaggctgaggccagtggaggccaggagttccagaccagcctggtcaacatggtgaaccctgtctctactaaaaatacaaaaattagccagagtggtggtgggcccttgtaattccagctactcgggagggtgaagcagaatcgcatgaacccaggaggcagaggaggtagtgagctgagatcgcgccactgcacttcagcctgggtgacaacgttgagactccgtttccaaaaacaaacaaacaaaagctgctacaatagtctacctctcccagaaatttgaaaaaccattaccctaaagcatctaacaggacatgggaacatggtagtcatttattgtttagcaaattcacattatatccagctagaaagcaatttcattctgctgttttctaaaaggcagagggcaaaaccctagaaaaagacaaaaacctcaaaaaaacaaaacaaaaacaaaacctcagtctaaatactagaacagaactgatgaccataaaaacaatctcttgtcctttcaacaaaaccccaagcctggctcaaagagtttaacctactacccttgtctcccattcaacccaatttaacaaattaaggttctagattgaagaacacttacgtgggaagttagcatgatggaaggcaaacacgggtttaggacaaacatctccccccctcactgtaatctccttctttcggcgtagctcatcaacctcatactattgaaaaaaaatgaaagaagttagtaaactagttattctaaacattcagaatttatgttccaagctagctgagcaattatccagtccacagctatgttggcaaatatttaatagtttacatggtactttcatgtgtatcactttaactctgcaaggctcctacttactttgtaagttaattaatgatgtaggtgattaagagttccattttctataggagaaaaaagataagtaacttgctcaaggtcagaatgagaaggaaaaaaaagtggaacttggacccaagtactctttccattacactttcttctgaaagagtaaccatttcatgtgtagagtccaaaaaacaatggtaatgaggtacaagaagagacaatgttggctgggcacggtggctcccacctgtaatcccagcactttgggaggctgaggtgggtggatcacttgaggtcaggagtttgagaccagcctggccaacatggtgaaactccgtctctactgaaaaaaaaaaaataaataataaatgaaccaggcgtggtggcacatgtctgtaatcccagctactcgggaggctgaggtgggagaattgcttgaacctgggaggcagaggttgcagtgagccaagatcatgccacagcactctagcctaggggacagagtgagacttcacctcaaaaaaaaaaaaagccaatctatctttttcactaacagatgaaaaaacatgacctaatatacaatatttcaatcatgtataataaacagattagtaagcattatcaacaagagaacaaattaaatgcatatttaaactggtccccttttatgagtattaggggtcttagataagaatgtaagaaaggctgggcatggtggctcacacccataatcccagcactttgggaggctgaggcgggcagatcacaaggtcaggagacggagaccagtctgatcaacatggtgaaaccctgactcttgcactccagcctgggtgacagagcaagattccgtctcaaaaataaaaagaggctgggcgtggtggctcacgcctgtaatcccagcactttgagaggctgaggcaggtcgatcacctgaggtccgaggtccggagtttgagaccagcctgcccaacatagtgaaactccatctctgctaaaaatacaaaaaattagccgggcatggtggcgggtgcctgtgatcccagctacctgggaggctgaggcagtagaatcgcttgaacccaggaggcggaggttgcagtgagccaagatcacaccattgcactctagcctgggcaacaagagcaaaactccgtctcaaaaaaaaaaaaaaaaaaaaaaaaaaaaatcagctgggtgcagtggctcacgcctgtaatcctagcactttgaaaagctgaggcaggtagtttgcttgagctagggagttcaagaccagcctggggaatatggcgaaacccggtctctacaaaaaggaaaaaaaaaaaaaaattaaccaaaaaattttttaagaaaaatatcaccacactagaataaaatgtaaaacggcaacagtagcgtatgaataaactctaaccaatatatctacttggttcaataatctgtacattaaaacacacatgtaaacttactggtgtcagccttgctacttccggatgttccacataaaaatttttctcaaacttggggagctcactcaaatcccacttttttttacgcaaacgctccccaggattaccaaatttcttcgggggaaggccaccaccacctcttgctccaaatctaggaacagaatttttagttagttcatcagtatttttaaagcaacgtatcgtacatgccataagaatattcaaaaaggatggagttctagggatactaccagcctacctccaaaaagaccattttatttgctgtgatttaaaggtatggagaaatgtgtaaaacctcccttactacccaacaataaatactgtttatgaatatagctacaataggcaaaaaattaaaaatccctttattgagagaaatacatcctagggattacaatcacagattctggatccagacatggtttgagtttttattctgccacttactgtataatttgaagagaattatttaacttccacacaccttagtttcctatgcaaagtagaaataataccacttatttcagaggctgctgagaaaatgacctaataatgtgtaatgtactataaaagtatctggcatagccagcactcagtacaagttagcatcatttcattcaacaaatagttattaggtaccaagttactaggtaccaagtatgtatcggctactgtttgaagtggtgctgtgctggagttactaaacaaaacagacacaagtctctatttttgtgtaacagacatgcaggcaaaggatgacattaagttaagtttcaattaaagggaagattgtggacaagaaggaagatacactccaagcaagtccctcaatcttagaatagcttcttgggcctgctcccctattaaactgtgataagcactccacctgtctgcttatctgcaaagcaaaactgggtcttggaaaggactggtagactggtcttcatttttagcttacgctaataaaagagctgagcctgccgggggcagtggctcagtcctgtaatcccagcactttgggaggcggaggccagtggatcacttgaggtcaggagtttgagaccagcctggccaatatagtgaaaccctgtctcttactaaaaacacaaaagagtagccaggcgtggtggtgcacgcctgtaatccctagctacttgggaggctgaggcaggagaaccgctggaactcggaaggcggaggttgcagtgagctgaaatggcaccatagcactccagcctggtagacagagggagggtccgtcaaaaaaaaaaaaaaaaagctgaacatagatttatgacctttccttcttctttgatctctacttttaccttctatctccttcttgttcccaaatggtattattaatttacagagaaaaaaacactaacaagacttatttaaggctttaacactcaactaattacttaagatcaacttcttgctttttatatacctttcacaacagacaagctcaagaggaatacaaatatgaccactagccaaagctaatatttaagaaatcagaagctacttttcctagaagaatcttaacactaagatggccttaattttccctatttcgatcttgtaaagtacaggtctttgtttggcatacaaactgtatagcattttctcagtttctttactccttgtaaaatattgtactgaatttagttcccttttcccactctaacccacttgtaacttcatcttatataaagttccactttatcattgataggcaagtaggtgtattattctacagggcctcaatttcctgcaattcaaagccattagaactctggcttaaccagccagacattcctctaaatacatacgtaacaaaaattgatggcaggagattttattgggatcactggatacctacactcaacaggcagaacttggctaattccatttataccactactgagacagtgaagacaaattaagaatcagaacaggaagagcacatagcatagggatacccgtgtcagcgacatatttaatatgcccctcagcttaagactcaatactgaacagaccaaaaggccacctcaattgccgctcccgccacacttgcaaatgaagcagctaaataaggtacttttcaagaggtagaaagtctttggattatcactcttgcaaattataaaagacttcattgttattgccacattgcaatgctacccaaaccttagtgacttaggaaaaaataaaacttgaaagtaagattcctgttaaggctttaaactgatgattatcattcatgtatttttttttcctctctccttacttccctggctatttattcaagacattctattctacactaaacatttaatttgaaacatgtggttcttggaaaatatgccgtcttccatgtttataattaatgctgacataattaatgacctcaaaattcaagaaagccttttacttttgagcatatccatgccatctttaaatacgcacactgtactctctggtatactatgctgctcaaatgtttttatccggtcagtaattagtttaatttggctttacaaaaaaattcacctttgaagtcatatattaacattaaaaaccatactacttcaaatgtacaatgcctatcatttttgcatcacacatgtgaaatacatgaactgacctcacctattcctttttcaaaataaccaccacttcaactgtgtaacactcagttgaaacaacagcaattcaaataatcaagaacatttcttgggaaagggagagttggggcacagatcttatgaaagaaggctagttcgtttgaaatttttaaaaaatgtcatctgatactcaaagtatggatcagtaattcacttttttcctttcaaataacttattaaagcatatatatggtgaaaggaaatattaaaccaaacaccaatggtaaagaaatagaacactattagtaacttgtagcccctctatgtgcctatttcaagcttacaactttcaccctaataaccactaccttgaattttgttaaccactccctttcctatcatatttgcacatatccttaattaaatgtgtcaccctaccacaacgtgctttttaactcaacacttctgtgacttatccacattaatccaagttcttttctctttttcacggctgattcaattgtacgaatacccacaatttatggagacatttgcgttgtttccaatatcctgttagcacgaatgctggtatataaacttttctgtacaaggatcctggggtacctgtgcaaggatttctctaggcattacagtctagggtataaagcttagggaggaattgctgggtcgttttcaactttcctagataatctcaagttctttttctaagtcaatgaactgaaattcacttctaaacttagcaatactgtcacacgcgaagcaaacattccacctctcatcctctaaacaatgagataaaatattttccttcctaataaggtataaatcaaaataattttgtaaaaagtggcaactgaagtgcttgagactagtaaatccagcagttgtggatctgaaccacaaaagacaaaaacgtttggagaaaatatcgttaacagagcgcctactacagtgagactattacatccattatctcttaattcctgacaacacagcaaagtaaaggcaattatcacgttcctcagaggaaacaggctcacaaaaggtaggatcttgaccaaggtcacacacacacatatcaagtggcgtcacgtaactctttggggaagcgggggggtcgggggagacggagtttcgctcttgccacgggctggagtgcaatggcgcgatctcggctcactgcaacctcctccccccgggttcaagcgattctcctgccttggcctcccgagtagctgggattacaggcatgcgccaccaagccaggctaattttgttatttttagtagaaacgggatttctccatgttgatcaggctggtctcgaactcctgacctccggtgatccgcccgcctcggcctcccaaatcgctgggattacaggcctgaggcaccacgcccggtccacaataccaagaactttctagcgaggcagaatagttgacgctgcagtccaattagagaaaaaaggctgaaatattaagattaaaactaaagtaacgacccaaaaacccatccttcccccaaacacggtcatttagatggcaagcaactccactgctttacatcccaatgcatttcctccgacttaaaatataactgaagagaattaaaatctatttctaaaaatgagaagttggtcttttcgtctcccgtgccttaaacagtgaactctggggagagaacgtcaagggtgccatttcgtgtaaggctttcctgggctgaagtgttctctcaggaagatccgcgtttttcagatgaacgccgaggcctggagacatcgaacagcccgcccgaagcggcccggctcgagagccgggaaaccaggcgaggcgccaaagcccgggcctgggctgatgcggccaggccgcccctcccgatcccccgcggggctgggatggggccgggccgcgccacgacggccgtccgcacggagaggcccagcgtcgccaagcggccgccctcctcgggtcccgagtgaccccggggccgaggtccgcgcacgaaaccgctgtctcgcctcgagtcgcctcccctcgcctcccgggtcgagagcaaggctcccaggctcgcagtccgccgggcctccccaagaagcaactcccccacccccacgccaggcctctcctctcctcccccacccttaccctccacggtcacgatcccggtcccggtccccaaagcctcctccgcgcatggtcccaaaaggatagagatctgggagcggggcacggatggccgggctcgggagggcctgcggctccggtctggtgacgaccgatggcggcggcgcctccgctgttggggcggcggcaggcgcagcgctctctcgctccgacgcgctgtctcccgtcgcagacgccaccgtcgccgcctctctcgtcggagacgggagcaaaacacagagaatcggggctacaaagccggtgggcaggtttggctacgctcaaaccgggcagtgccgcggtttaggcgtctccttccttcccagcgactgcacaaaatggcggccgccgctgagtcggctccaacttaacgctgcgtacggcggagacgatacgtaaacagcgcctcggaatagcccgagggctccgcggggaactacgggtattcttggaagcactttacgtcagttgcgacgatgggtgtattttgcggtctgtacaagaaaaacaaagtacggagcgagcgtagagttctcgcgccacccgaactagaacgtgggatgaggtgggaggaagcgcctctggtgcgacgtaacattctttgcgtcgttagccggcctgctgttgctaagatgcgcagtatgcgtaacgcattctgtttagagaatagaggattttgcctgattccgatctcggtacagaccccgcggccggcttgaagaagttgctttgcagagacaataaccgtcctccatattgttatcaagtttcagagtcctctggcgccagaggccgggagggtcttaaattccgtggctggccttcctatatggcgccgccagccctctcgccccaccgccctgggcccgctgagaatggcggcgggccccggcgccatttcctttccgttgcctttcgctgctctgtctccggcagccatgatggaagagccgtgtccctttctttccggagtttgtgaggtggcgatgtcccttccaggttaaagtgccctcagctacatttggttcacactgaggtgcattttctgaaccgtatatttttaccgtccctggccgagcacagctgttgctaatacagaaacaaaatgtgcttggaggccaggcatggtggctcacgcttgtaatactaacactttgggaggccgaggcgggaggatcacctgagtcccggagttcgagaccagcctggccaaaatggcaaaaccccgtctctacgaaaaatacaaaaattagcaggacatggtggcgggtgcctgtagtcccagctacttgggaggctgaggcaggagaatcgcttgaacccgggagtcggaggtcgcagtgagccgagaacgtgccactgcactccatcctggacgacggggcaagaatccgtctcaaaaaaaaaattgcttggagccccagtggactccgtgggccctttgctgccgttgaacggcgctcctcagaaggcccggagaagaccccagcactctcaggagaacaaggtttcagagcgatggtctttagacacagaaagggcgaaggctaaggacaagtgtttaaccaggctagtccacgttctccgctcaattccttccagactggcttccctctccttacctgcttcctgtcgtctcaaactgcattttgaagccccgcaagcttggccaaatggcgtcacacgactgttgagctgttagggccctcgagacgggcccatctaacgtctcaattcaacagatgggtagaagcggggagatttggcccctcagtgtgggtgctgagtgtttgtttcccaaatttttgggaacatagcataagaaaaggagcttcaaaaagaaaaaaaacatggaccactgatttttctgtggttatgtgttctttttccccaagtacgttcttaacattggcaagtgaacctcttaaagtgattgagactcgcctgggtcatattctttttcttttttttgtctggagtgcagtggcacaatctcggctcactgcaacctctgccgcccgggttcaggcaattctcctgcctcagcctcccgtgtagctgggatcacaggtgcttgccctcgcacttggctaatatttgtagtttagctggggtttcaccatcttggccaggctggtcttgaactcctgacctcgtgatccacccgtgtcgacctgccaaagtgctgggattacaggcgtgagccaccgcaccggcctgggtcatgttcttttatttacactgttaacctgccccaatcctcatcatctcttgcctggatgactgcgctcgcctctttttaatctgcctgctcctgtccttgctcactctgaatttattcttcacactgcagtcataggggtccttttattatgtcactttacttaaaattttccagaggtttccacttgaaagaaaagacaaaggccttacagtggcctacaagcccttgaggatgcagccctcttctgtctttcctccttgttctactctagccacactcggcctcagggcctttgcactcgctctttactctatgtcagcaaggctagatacctcagtttaggtctgtgctcacatgtcactcaatcagggaggcctccccagaacccaatgcaacactgcataacctgcatactctcctccttcacaagtacacatgcattctctcttttccatttttctttgctttcatttgaattagtaactgcttgacataaacactttttgtctccctcctagagcgtaaaatctgtgagtgcaggaacttacttgttcaccaccgtgacccagtgcctacctggcacagtgcctgaccttttagccattcgaccacgccatacccttgtccagtgagtctgtgactgtccctttgtgtttctgggccaactgacatctcaacggcttttgttttttgagacagagtctcgctctgtcgcccaggctggagtgcagttggctcactgcaacctccgcctcttggtttcaagcgattctcctgcctcagcttcctgagtagttgggattacaggcatacgccaccacacctggctaatttttgcatttttaatagagacagggtttcaccatgttggccaggctggtctgaaactcctgaattcaggtgatctgcctgcttcggcctcccaaagtgctgggattacaggcgtgagccaccttgcctggcctttgtcatcaacttttattttaattctggggtacatgttcaggatatacaagtttgttacacaagaaaacgtgtgtcatggtggtttgttgcacagatcaaccccttgcctcggtattaggcccagcatccgttagctattcttctcgatgctctccctccgccgacccccaacaggccccagtatgtgttgttcccccgctccatgtgtccgtgtcctcttctgggtctttgatagtcttcactgatgctttctgctcacgctcagataatctgcattttcacgtaagataaaataatcatagagcagaggcagcagtcagctatgtgtttgtttcaggcgagcagagggatgactttttagttttgtcctttgtcctgtgcttgtgatggtaaaccatcaatgtacattgtcggggtgaaattcaacggaactgttttagtgtaaagatcttggaggcccacaaggaatttctttgtgggcaaattgtgagaggcctatgtagctttttttgttttttgtttttttttagagacagagtctcactctgtcgcccaggctggagtgcaatggcgcgatcttggttcactgcaacttctgcctcctgggttcaagcaattctcctgcctcagccttctgagtggctgggattacaagcatgcgacatgacgctaatttttatattttttagtagagactggcttttgccattattagccaggctggttttgaactcctgacctcaagtgatccacccaccttggcctcccaaagtgctaggattacatggccaccgcatctggccttcattatatattacggtgtaataataatataaataggccgggcctaatagaaatagtctggctaacatgatgaaaccccgtctctcctaaaaatacaaaaaaattagctgggcgtgatggcgcatgcctgtagctactcaggaggctgaggcaggagaatcgcttgaattggggaggtggaggttgtagtcttaaaaatggtatttacaggctgggcacagtggctgacgcctgtaatctcagcactttgcggggctgaggtgggcagatcacttgaggtcaggaactcgagatcagcctggccaacatggtgaaaccccgtctctactaaaaatacaaaaaattagccaggtgtgatggtgggcgcctgtaatcacagctactcgagagcctgaggcaggagaatggcttgaacccaggaggcggaggttgcagtgacccaagatggcaccattgcactccaacctgagcgacagagcaagactctgtgtctaaaaagacagaaaaaagagaagtttcctctagagcgctgaatgacaagagacaatgtggagagagaagtctcatacttacaagtatatcctgccaagaccccagatatacaagtgaggccatcccagacccttcagccagcctactagctgaatgtagctgcgtgagtgagctatttccttcctccccgcaaaatcccttatctttttcttcatgttttcatcttaggatatgaaaaggaaactgctgtagttgttttttaaccatgaagggaacttttggagaacagaaccagcacaccgaaggtggggaaagtggagagaaggaaagaacctgggcccttgatgacattatagagtcactgtattagccaactgtggagctggttgacttctggacttcttatttgaaatgacatgcttcctcattgtttaatctacttttttgagctttgtgttacttgtagctgaaagcattctaactgatacactcctcaaccagctcttctaatacaagtacaaaatctgaaacaagtcaggcatggtggcatgtgcctatagtcccagctacttgggaggctgaggcgggagggtcgcttgagcccaggcatttgaggttgcattgagctatgattgtgccactgcactccagcctgggtgacagactgagaccccatctgtaaaacaaacaaacagaaaatctgaaacaccttgcatagtatacaataggcattcaataagtttatcattaatgaggaagtaaaagaagattttgttgtaaagaatgctaattgcttatccaacaaccattctccctttctcccttttcaattaagagtcaggaggctggcgctgtggctcacacctgtaatcccagcactttgggaggccgaggcgggaggatcccttgagcccaggagttcaagatcagcctaggtaacatagtgaaatctcagctctacaaataataaaaaaattagctgggtgtggtggtgtgtgtgtgtggttccagatactttccatatacgtggaaggctgaggtgggagcgtcacttgagcccaggtgcttgaggctgcagtgagctatgcttgccccactgcactccagcctgggtgacagagagagaccctgtaacctctggaaaaaaaaattgagcgagagagagaagacagggtcttgttctgtcacctgggctggagtgcagtgacacgatcacagctcactgccatcttgaactcctaggctcaagcgatcctcacgcctcagctgctgagtacctaggtctacaggtgctcatcaccatgcctggctccttttcctccttaataacagaactccaaattttagctgggcatattgatgtctggaacaaaagtctgtattttcctacctcttttgtgcatgggtatggccaatgagatataagcacaagtgttgtatggtagggctgctttacaggagctgagtcagctagacagagcttttccttctttttttttctttttgcccttctgccttttatctttctttctttctttgagacagggtctcactctgtcacccaggctggagtgcagtggcacaatcttggctcactgcaacctctgcctcccgggttcaagagattcacccgcctcaacctcctgagtaactgggagtacaggcgcatgccaccacacccggataatttttgtatttttagtagagatgagatttcaccaggttggccaggctggtctcgaactcctgtcctaaagtgatccacctgcctcaacctccctaagtgctgggattacaggtgtgagccactgcacccagactgccttttatctttcttctctcaacttggtttctctgactagagctccagctgccaacttaggcaatgagctgaccttgaagacggaagtcaaaaattaagatggtcaagcagaaagatagaggcctgcgggcctgatgacaaagtggacccactgtagtagcatctctggactgcctagctttagatttcttttctatgagagaaaaataaacctgtattttgtttgggacacttattttgggggttttcccttatattcagtcaagtaaaatctaagctatccctttaacaacttccctctcaaaatattgaagcctggcgtaggaaagcacgtgaagagtatgaataatgagagctgtcccacccgagtgttaagcaagcccctcctggcttccctttctccagtccctgaaggcggcacttgagaggcactctgttgttaccttggttggagttctagatggcaagtgatagaatctaactggctaactaaggcaaagggaaacttattagaaagacattaggggctgagcgtggtgactcatgcctgtaatcccagtgctttgggaggccaaggcgggtggatcacctgaggtcaggagttcaagaccagcctagccaacatggcaaaaccccatctctattaaaaatacaaaaattagctgggtggggttgtgcacacctgtaatcccagctactcgggaggctgagacaggagaatcgcttgaacccaggaggtggaggttgcagtgagccaagatcacaccactgcactccaggctgggtgacagagctagagtctgtctcaaaaaaaaaaaaaaggacattagggttcattgaattagcagaagactgcagaaacagcctgggcatggatgggagtctgagccactcagcagtctaggagccggaaaccccagtctagcagcaggaacagcctggtcaggcctctgccactgctgctaggccctgctgcccctgctccccctgctgtcactgcaggtgtgagcagcctctaacccctgctgtcatccttgtgactgtcacttcatattcaatgtctcaggatgcactacctgaattggggagaggtgactctttgaaagaaaacaagtgttattatgatggagaaatgcaaactgtgcaaccagaaaatgtgaaacatttgccctaacaagccagggtcagttgaaggagtcctgactagccacacttggtgtctaaggcccaatccttctcctcaccatgatgaaagatatcccttgtatctaatctctttctctttctctctctctttcttttttcttttcttttttctgagacggagtttcactcttgttgcccaggctggagtgcagtggcaccatctcggctcactgcaacctccgactatccggttcaagcgattttcttgcctcagcctcctgagtagctgggattacaggtgcgcaccaccaaacccgactaatttttttgttggggtttcgccatgttggccaggctggccttgaactcctgacctcaggtgatc

SEQ ID NO: 157 - DNA, 501 bp, Homo sapiens
  CDS (62)..(373)
gccttccggcgggtgacattcagccggcggttcggggcgacggactctccattccagaaccatggcccaatttgtccgtaaccttgtggagaagaccccggcgctggtgaacgctgctgtgacttactcgaagcctcgattggccacattttggtactacgccaaggttgagctggttcctcccacccctgctgagatccctagagctattcagagcctgaaaaaaatagtcaatagtgctcagactggtagcttcaaacagctcacagttaaggaagctgtgctgaatggtttggtggccactgaggtgttgatgtggttttatgtcggagagattataggcaagcggggcatcattggctatgatgtttgaagaccaatctttaacatctgattatatttgatttattatttgagtgttgttggaccatgtgtgatcagactgctatctgaataaaataagatttgccaaaaaaaaaaaaaaaaaaaaaaaaaaaaaaa

SEQ ID NO: 158 - protein, 103 aa, Homo sapiens; identical to SEQ ID NO: 73

SEQ ID NO: 159 - DNA, 1766 bp, Homo sapiens
  CDS (132)..(1103)
ggcaaatccggcccaggatgtagagctggcagtgcctgacggcgcgtctgacgcggagttgggtggggtagagagtagggggcggtagtcgggggtggtgggagaaggaggaggcggcgaatcacttataaatggcgccgaagcaggacccgaagcctaaattccaggagggtgagcgagtgctgtgctttcatgggcctcttctttatgaagcaaagtgtgtaaaggttgccataaaggacaaacaagtgaaatacttcatacattacagtggttggaataaaaattgggatgaatgggttccggagagcagagtactcaaatacgtggacaccaatttgcagaaacagcgagaacttcaaaaagccaatcaggagcagtatgcagaggggaagatgagaggggctgccccaggaaagaagacatctggtctgcaacagaaaaatgttgaagtgaaaacgaaaaagaacaaacagaaaacacctggaaatggagatggtggcagtaccagtgagacccctcagcctcctcggaagaaaagggcccgggtagatcctactgttgaaaatgaggaaacattcatgaacagagttgaagttaaagtaaagattcctgaagagctaaaaccgtggcttgttgatgactgggacttaattaccaggcaaaaacagctcttttatcttcctgccaagaagaatgtggattccattcttgaggattatgcaaattacaagaaatctcgtggaaacacagataataaggagtatgcggttaatgaagttgtggcagggataaaagaatacttcaacgtaatgttgggtacccagctactctataaatttgagagaccacagtatgctgaaattcttgcagatcatcccgatgcacccatgtcccaggtgtatggagcgccacatctcctgagattatttgtacgaattggagcaatgttggcttatacacctctggatgagaagagccttgctttattactcaattatcttcacgatttcctaaagtacctggcaaagaattctgcaactttgttcagtgccagcgattatgaagtggctcctcctgagtaccatcggaaagctgtgtgagaggcactctcactcacttatgtttggatctccgtaaacacatttttgttcttagtctatctcttgtacaaacgatgtgctttgaagatgttagtgtataacaattgatgtttgttttctgtttgattttaaacagagaaaaaataaaagggggtaatagctccttttttcttctttctttttttttttcatttcaaaattgctgccagtgttttcaatgatggacaacagagggatatgctgtagagtgttttattgcctagttgacaaagctgcttttgaatgctggtggttctattcctttgacactacgcacttttataatacatgttaatgctatatgacaaaatgctctgattcctagtgccaaaggttcaattcagtgtatataactgaacacactcatccatttgtgcttttgtttttttttatggtgcttaaagtaaagagcccatcctttgcaagtcatccatgttgttacttaggcattttatcttggctcaaattgttgaagaatggtggcttgtttcatggtttttgtatttgtgtctaatgcacgttttaacatgatagacgcaatgcattgtgtagctagttttctggaaaagtcaatcttttaggaattgtttttcagatcttcaataaattttttctttaaatttc

SEQ ID NO: 160 - protein, 323 aa, Homo sapiens
MAPKQDPKPKFQEGERVLCFHGPLLYEAKCVKVAIKDKQVKYFIHYSGWNKNWDEWVPESRVLKYVDTNLQKQRELQKANQEQYAEGKMRGAAPGKKTSGLQQKNVEVKTKKNKQKTPGNGDGGSTSETPQPPRKKRARVDPTVENEETFMNRVEVKVKIPEELKPWLVDDWDLITRQKQLFYLPAKKNVDSILEDYANYKKSRGNTDNKEYAVNEVVAGIKEYFNVMLGTQLLYKFERPQYAEILADHPDAPMSQVYGAPHLLRLFVRIGAMLAYTPLDEKSLALLLNYLHDFLKYLAKNSATLFSASDYEVAPPEYHRKAV

SEQ ID NO: 161 - DNA, 1733 bp, Homo sapiens
  misc_feature (19)..(19): n is a, c, g, or t
  CDS (95)..(406)
ttcggcacaggcgggagancggcggggccgaagcgtgaactcgcccgctccggcttgcttcccccgcgccgcctccccgcgccgctcggaagccatgtccgaggagaagcccaaggagggtgtgaagacagagaatgaccacatcaacctgaaggtggccgggcaggacggctccgtggtgcagttcaagatcaagaggcacacgtcgctgagcaagctgatgaaggcctactgcgagaggcagggcttgtcaatgaggcagatcagattcaggttcgacgggcagccaatcaatgaaactgacactccagcacagctgagaatggaggacgaggacaccatcgacgtgttccagcagcagacgggaggtgtgccggagagcagcctggcagggcacagtttctagagggcccgtccccagcccgggccgtccatcctcgcattgctgttgaatggtgagcacgtgaccatgccgaccacaaaggtgtctgcggaaactcgaggacattcaccacgatgattttcctctctttgatgtacttcaagtgcaactcaaaactatatctgcagggatgaatctgtaacttaaattgggccaatcagaattgttatctttgttcaggtaaaatgagttgcaagatattgtgggtacttttgtgtgctcatttgtgttttccccccctcctacaacatttttttaaccccaaaattatagcctgaatgttcgcttttagtctggccagggatctgactcctgagttggttgcctctcccctgctcactccagtcacatagagaattggtgtttcccgcagtggggattgcagctgttggacaggtattgggggcaaggttggtagggaggacagactgtcacttgctgttacaggcacaggtgattaaaatgctaaatattgcaaatttaagctttgtcagtatatggaaaagttgaagggaaaatactggaatgcttcttcaaaggttaaaaaataaccgagtcttttggtaatttgaccccacgtgctctctggccctcaagcatgtaacctcggggtctgaggcccaggacccacccccctgccacccctcccaccccactccctgctcagtacctggcgttggtacacaggcaaggattggcacaaccaaaattggcctttttctccctcttaatattgaagaaattcccacatttctcatttggtaatggtgttgtggcctcagatttcttctagtatttgcttctgatgaatgattatggtctatacataaaaaagtaagactaagtattgctgaatttgcagttatgttgtcgtgtataagagctacttccaagtgtggttacaaatgaacccatggaatgatgacttcatgttcttctcgtgggtttgtgccgtgctgctttccaaataggtattgaatttatgcattagtctggtgatttcagttctgtgaaatattttgggatctataccaattaaacattttcatagttctgcctattgtccttccctgaggctccattgctgcttggtggccattctctgcctttttacagtcacctgaacaatgacccatcatctcttgcttgcttgaaatcttgctgaaatgttctcatttcctgtttgctgtatgggctcgggtgggatgtttgttggctctgttgtgtttattcaccaatttgtacattatttgttgtcctttactactgtaaacagtaaatatagtttggt

SEQ ID NO: 162 - protein, 103 aa, Homo sapiens
MSEEKPKEGVKTENDHINLKVAGQDGSVVQFKIKRHTSLSKLMKAYCERQGLSMRQIRFRFDGQPINETDTPAQLRMEDEDTIDVFQQQTGGVPESSLAGHSF

SEQ ID NO: 163 - DNA, 992 bp, Homo sapiens
gatggcccctccgggaaactgtggcgtgatggccgcggggctctccagaacatcatccctgcctctactggcgctgccaaggctgtgggcaaggtcatccctgagctgaacgggaagctcactggcatggccttccgtgtccccactgccaacgtgtcagtggtggacctgacctgccgtctagaaaaacctgccaaatatgatgacatcaagaaggtggtgaagcaggcgtcggagggccccctcaagggcatcctgggctacactgagcaccaggtggtctcctctgacttcaacagcgacacccactcctccacctttgacgctggggctggcattgccctcaacgaccactttgtcaagctcatttcctggtatgacaacgaatttggctacagcaacagggtggtggacctcatggcccacatggcctccaaggagtaagacccctggaccaccagccccagcaagagcacaagaggaagagagagaccctcactgctggggagtccctgccacactcagtcccccaccacactgaatctcccctcctcacagttgccatgtagaccccttgaagaggggagggggctaggagccgcacttgtcatgtaccatcaataaagtaccctgtgctcaaccaaaaaaaaaaaaaaaaactcggagggccttatttcggtcgggcgaaagaggttgaattggacatggcttaggtgttccgtgcgccccggttttttgtcacggtggaagttccgggccccaaggggggattaattcgaacgcgtctgatattttagacgagagcggcgagtatacccccaaaacggcgttttgtcgacagacgtgctctcgtacgactcgtcgcaaacaccccacacggtggccgccacaacacaatcgagagaacagccgcagaaacgctatattgggcgcgagaacacacacacacactgcacgcaggccagaccagcggccgatagacgaataactgg

SEQ ID NO: 164 - DNA, 661 bp, Homo sapiens
  CDS (36)..(500)
agagacttcctcttcgttaagtcggccttcccaacatggcgcagtctattaacatcacggagctgaatctgccgcagctagaaatgctcaagaaccagctggaccaggaagtggagttcttgtccacgtccattgctcagctcaaagtggtacagaccaagtatgtggaagccaaggactgtctgaacgtgctgaacaagagcaacgaggggaaagaattactcgtcccactgacgagttctatgtatgtccctgggaagctgcatgatgtggaacacgtgctcatcgatgtgggaactgggtactatgtagagaagacagctgaggatgccaaggacttcttcaagaggaagatagattttctaaccaagcagatggagaaaatccaaccagctcttcaggagaagcacgccatgaaacaggccgtcatggaaatgatgagtcagaagattcagcagctcacagccctgggggcagctcaggctactgctaaggcctgagagtttttgcagaaatggggcagagggacaccctttgggcgtggcttcctggtgatgggaagggtcttgtgttttaatgccaataaatgtgccagctgggcagaaaaaaaaaaaaaaaaaaaaaaaaaaaaaaaaaaaaaaaaaaaaaaaaaaaaaaaaaa

SEQ ID NO: 165 - protein, 154 aa, Homo sapiens
MAQSINITELNLPQLEMLKNQLDQEVEFLSTSIAQLKVVQTKYVEAKDCLNVLNKSNEGKELLVPLTSSMYVPGKLHDVEHVLIDVGTGYYVEKTAEDAKDFFKRKIDFLTKQMEKIQPALQEKHAMKQAVMEMMSQKIQQLTALGAAQATAKA

SEQ ID NO: 166 - DNA, 1919 bp, Homo sapiens
  CDS (75)..(1202)
gtctcagtcgccgctgccagctctcgcactctgttcttccgccgctccgccgtcgcgtttctctgccggtcgcaatggaagaagagatcgccgcgctggtcattgacaatggctccggcatgtgcaaagctggttttgctggggacgacgctccccgagccgtgtttccttccatcgtcgggcgccccagacaccagggcgtcatggtgggcatgggccagaaggactcctacgtgggcgacgaggcccagagcaagcgtggcatcctgaccctgaagtaccccattgagcatggcatcgtcaccaactgggacgacatggagaagatctggcaccacaccttctacaacgagctgcgcgtggccccggaggagcacccagtgctgctgaccgaggcccccctgaaccccaaggccaacagagagaagatgactcagattatgtttgagaccttcaacaccccggccatgtacgtggccatccaggccgtgctgtccctctacgcctctgggcgcaccactggcattgtcatggactctggagacggggtcacccacacggtgcccatctacgagggctacgccctcccccacgccatcctgcgtctggacctggctggccgggacctgaccgactacctcatgaagatcctcactgagcgaggctacagcttcaccaccacggccgagcgggaaatcgtgcgcgacatcaaggagaagctgtgctacgtcgccctggacttcgagcaggagatggccaccgccgcatcctcctcttctctggagaagagctacgagctgcccgatggccaggtcatcaccattggcaatgagcggttccggtgtccggaggcgctgttccagccttccttcctgggtatggaatcttgcggcatccacgagaccaccttcaactccatcatgaagtgtgacgtggacatccgcaaagacctgtacgccaacacggtgctgtcgggcggcaccaccatgtacccgggcattgccgacaggatgcagaaggagatcaccgccctggcgcccagcaccatgaagatcaagatcatcgcacccccagagcgcaagtactcggtgtggatcggtggctccatcctggcctcactgtccaccttccagcagatgtggattagcaagcaggagtacgacgagtcgggcccctccatcgtccaccgcaaatgcttctaaacggactcagcagatgcgtagcatttgctgcatgggttaattgagaatagaaatttgcccctggcaaatgcacacacctcatgctagcctcacgaaactggaataagccttcgaaaagaaattgtccttgaagcttgtatctgatatcagcactggattgtagaacttgttgctgattttgaccttgtattgaagttaactgttccccttggtatttgtttaataccctgtacatatctttgagttcaacctttagtacgtgtggcttggtcacttcgtggctaaggtaagaacgtgcttgtggaagacaagtctgtggcttggtgagtctgtgtggccagcagcctctgatctgtgcagggtattaacgtgtcagggctgagtgttctgggatttctctagaggctggcaagaaccagttgttttgtcttgcgggtctgtcagggttggaaagtccaagccgtaggacccagtttcctttcttagctgatgtctttggccagaacaccgtgggctgttacttgctttgagttggaagcggtttgcatttacgcctgtaaatgtattcattcttaatttatgtaaggttttttttgtacgcaattctcgattctttgaagagatgacaacaaattttggttttctactgttatgtgagaacattaggccccagcaacacgtcattgtgtaaggaaaaataaaagtgctgccgtaacc

SEQ ID NO: 167 - protein, 375 aa, Homo sapiens; identical to SEQ ID NO: 133

SEQ ID NO: 168 - DNA, 547 bp, Homo sapiens
aagattgtattacttgattttattttacactaggtggtgggcacacaaagtaatccttaataaagttgacaattagcttcactcaatatttttaataatgcacattaaaaaaaagtattcatcttacaaattcttctgcaatccaaacatacaatagcttggagaacatttagaaaacaaaagccaatgtaaaaagacagattaaaacaactagaacagtacaggttttatttatatggctcaaattttacagttttcttactgcatcatcaatgtcagaaatctgttccttcagctggctccattgttctggatttaaagaaataccttttcttcctgggttcatttcaccttcaggatccatccaatattctctaatatcaattagcactttgcctttaaaatcgggaacactaacgtacctcattttcccaatctgaaacatgttatcatctttgctgcttgtgctctgtttacaaaaagacagggctcttgaagtctcacctgttttctgttttttacagctcttactgagcaacttcttttt

SEQ ID NO: 169 - DNA, 972 bp, Homo sapiens
gccgcccttttttttttttttttttttttttttttttttttcycattwaacttttttaatgggtctcaaaattctgtgamaaatttttggtcaagttgtttccawwaaaaartactgattttaaaaacwaaaaacttaaaactgccacacgcaaaaaaraaaaccaaagtggtccacaaaacattcycctttccttctgaaggttttacgatgcattgttatmattaaccagttttttacwachaaacttaaatggccaattgaaacaaacagttctgagaccgtccttccmccactgattaagagtggggkggcaggtattagggawaawattcatttagccttctgagcyttctgggcagacttggkgaccytgccagccccagcmgccttcttgtccmcygctttgatgamacccaccgcaactgtytgtytcaaatcacgaacagcaaagcgacccaaagggggatagtctgagaagcccycaacacamatgggcytgccaggaaccaaataaacaatggcagcctcaccagacttcaagaatttagggccatcttccagctttttaccagaacggcgatcaatctttccttcagcccagcaaacttgcatgcmatgtgagcgcgtgtggcaatccaatacaggggcatagccggcgcttatttggcctggatggttcaggataatcacctgagcmgttaagccagccgcttccattggtgggtcatttttgctgttaccagcmacgttgccacgacgaacatccttgamaraaacattcttgamatttaagcccacattgtccccaggaagagcttyactcaaagcttcawtggtgcatttcgacagawtttacttccgttgttacgttgactggrgcaaaggtgaccmccataccggggtttgaraacaccagtttccactcggccaamaggaacagttccaataccaccaattttgtagaaatcc

SEQ ID NO: 170 - DNA, 3881 bp, Homo sapiens
  CDS (96)..(1874)
gccgcctccgcctctctctttactgcggcgcggggcaaggtgtgcgggcgggaaggggcacgggcacccccgcggtccccgggaggctagagatcatggaagggaagtggttgctgtgtatgttactggtgcttggaactgctattgttgaggctcatgatggacatgatgatgatgtgattgatattgaggatgaccttgacgatgtcattgaagaggtagaagactcaaaaccagataccactgctcctccttcatctcccaaggttacttacaaagctccagttccaacaggggaagtatattttgctgattcttttgacagaggaactctgtcagggtggattttatccaaagccaagaaagacgataccgatgatgaaattgccaaatatgatggaaagtgggaggtagaggaaatgaaggagtcaaagcttccaggtgataaaggacttgtgttgatgtctcgggccaagcatcatgccatctctgctaaactgaacaagcccttcctgtttgacaccaagcctctcattgttcagtatgaggttaatttccaaaatggaatagaatgtggtggtgcctatgtgaaactgctttctaaaacaccagaactcaacctggatcagctccatgacaagaccccttatacgattatgtttggtccagataaatgtggagaggactataaactgcacttcatcttccgacacaaaaaccccaaaacgggtatctatgaagaaaaacatgctaagaggccagatgcagatctgaagacctattttactgataagaaaacacatctttacacactaatcttgaatccagataatagttttgaaatactggttgaccaatctgtggtgaatagtggaaatctgctcaatgacatgactcctcctgtaaatccttcacgtgaaattgaggacccagaagaccggaagcccgaggattgggatgaaagaccaaaaatcccagatccagaagctgtcaagccagatgactgggatgaagatgcccctgctaagattccagatgaagaggccacaaaacccgaaggctggttagatgatgagcctgagtacgtacctgatccagacgcagagaaacctgaggattgggatgaagacatggatggagaatgggaggctcctcagattgccaaccctagatgtgagtcagctcctggatgtggtgtctggcagcgacctgtgattgacaaccccaattataaaggcaaatggaagcctcctatgattgacaatcccagttaccagggaatctggaaacccaggaaaataccaaatccagatttctttgaagatctggaacctttcagaatgactccttttagtgctattggtttggagctgtggtccatgacctctgacattttttttgacaactttatcatttgtgctgatcgaagaatagttgatgattgggccaatgatggatggggcctgaagaaagctgctgatggggctgctgagccaggcgttgtggggcagatgatcgaggcagctgaagagcgcccgtggctgtgggtagtctatattctaactgtagcccttcctgtgttcctggttatcctcttctgctgttctggaaagaaacagaccagtggtatggagtataagaaaactgatgcacctcaaccggatgtgaaggaagaggaagaagagaaggaagaggaaaaggacaagggagatgaggaggaggaaggagaagagaaacttgaagagaaacagaaaagtgatgctgaagaagatggtggcactgtcagtcaagaggaggaagacagaaaacctaaagcagaggaggatgaaattttgaacagatcaccaagaaacagaaagccacgaagagagtgaaacaatcttaagagcttgatctgtgatttcttctccctcctcccctgcaagagtggtcctaggagaggacctggcacaccttaggttgacattcagaaaacttcaagacatcaccatcagcaggctccagttgaacactagtctgtgtaactttaaacatctagcagtaaatacttgcagttgtgatataaaggaccctgtttctgtagaaaagaaaacatttaacataatggttgtgaaatgtaacatgaagcaaactaacttttttttttttaacatctttgtttttaaaatagaatgatagaactttgccagtctttaagatcttggcttaatttaatgtattaatctgtttgtgcaaacataataccaccatttaaaaatgttagggagatgagttgcagtttttataatagattttttttaaagtttggtattgtaaaacattcacacctctgtccctcaaaattgataattacgtttaaagtgcagtcatttgtggttagaatcttgttttgtttgcttccattattgagttcctcctaaggaaattgaggagagggactgaatagaagcccaaattcatataaaagttgcgtttaagttgtattaaaaatagatatataagaaaaaattctttcacttgatgtttgttagaccagaaagtgtgtgtgttctgtagctcagttcccagacagctttttaggtagtggaggaggtggcttcatgtggcacttgggcatttatattccacttgggagggtcaggctgtggccttctggagcaggtggcttgttaaggaacgctagcagggcatggcacgtgagctccggaatagatgtcttcatcacttcttccactgtgtgttgacactgttttccttacctatttcctcagatccccagctttctcctctgctatgcattttcttcacagtgcagcttgcagtccgttgctgaaaatgattataagccctgcataatgttaagctttattgtgattacgtgtatgtttcttctttcttttaagcagacccatacctttccagggtcaaagtacagaatagaatacattgatacaaagtacagaaaaatactttgatttttatccatttcttttactctgtgtaaagacttgagaagtctaattcacaggcaaaccaatacagaattgactgcagttgaacagactagaagtatttgtgggaggagtgacatgaagcatgagttatctgattttttttgtagctgctatatattttaagccttcatttgcaattcatgtaacagttgtgtcataaattacacaataaagcagtcctgttcaaatttttttttaacgtggcttgtagaatttttaaaaaagtgatcttaggtttgttttttcatgcgggatgcagatgggtgctatcagagcctctcccacaccactatagtgtaataatgttattattactctacactgaaacgtattcagagttagatattattttagcttcagttgttctttagaggctttcaaatgtaccgatgatactgtttcttgcactgaatatataaacactccacagtgtttatattgggaagatattgggaaggaaatatatttgtaaaagatgaaggctgtatctatttttttttctttttaaagtttgttcacttaaattcttttgaggatgggatgtatttttcttgctgttcagtgctttttccttttcatctgttgttctgtggtcacagtgaccttagctacatagcagactttcccaaatgtattgattacaaataaacagttgttacttagcaagacctgaaaatatgtctgcaggtttctccttgaagcaaatgtgtgggatcattgcatttccagaaatctgcctccttcaccctccgttgacagtatatgtcatgcctcactttcttctagctgagctttaaatcattagagcttaaattgtcagatcgttcattgcctttccagggttatttagtaaagtttgttgaaaac

SEQ ID NO: 171 - protein, 592 aa, Homo sapiens [sequence omitted]

SEQ ID NO: 172 - DNA, 344 bp, Homo sapiens
  CDS (36)..(290)
cctttccggcggtgacgacctacgcacacgagaacatgcctctcgcaaaggatctccttcatccctctccagaagaggagaagaggaaacacaagaagaaacgcctggtgcagagccccaattcctacttcatggatgtgaaatgcccaggatgctataaaatcaccacggtctttagccatgcacaaacggtagttttgtgtgttggctgctccactgtcctctgccagcctacaggaggaaaagcaaggcttacagaaggatgttccttcaggaggaagcagcactaaaagcactctgagtcaagatgagtgggaaaccatctcaataaacacattttggat

SEQ ID NO: 173 - protein, 84 aa, Homo sapiens
MPLAKDLLHPSPEEEKRKHKKKRLVQSPNSYFMDVKCPGCYKITTVFSHAQTVVLCVGCSTVLCQPTGGKARLTEGCSFRRKQH

SEQ ID NO: 174 - DNA, 2190 bp, Homo sapiens
  CDS (486)..(1181)
ataaagcctgaggcggcggcagcggcggagttggcggcttggagagctcgggagagttccctggaaccagaactcggaccttctcgcttctgtcctccgtttagtctcctcctcggcgggagccctcgcgacgcgcccggcccggagcccccagcgcagcggccgcgtttgaaggatgacctctaggaagaaagtgttgctgaaggttatcatcctgggagattctggagtcgggaagacatcactcatgaaccagtatgtgaataagaaattcagcaatcagtacaaagccacaataggagctgactttctgaccaaggaggtgatggtggatgacaggctagtcacaatgcagatatgggacacagcaggacaggaacggttccagtctctcggtgtggccttctacagaggtgcagactgctgcgttctggtatttgatgtgactgcccccaacacattcaaaaccctagatagctggagagatgagtttctcatccaggccagtccccgagatcctgaaaacttcccatttgttgtgttgggaaacaagattgacctcgaaaacagacaagtggccacaaagcgggcacaggcctggtgctacagcaaaaacaacattccctactttgagaccagtgccaaggaggccatcaacgtggagcaggcgttccagacgattgcacggaatgcacttaagcaggaaacggaggtggagctgtacaacgaatttcctgaacctatcaaactggacaagaatgaccgggccaaggcctcggcagaaagctgcagttgctgagggggcagtgagagttgagcacagagtcctccacaaaccaagaacacacgtaggccttcaacacaattcccctctcctcttccaaacaaaacatacattgatctctcacacccagctgccaaaagaaaaccccatcaaacacagttacaccccacatatctctcacacacacacacacacgcacacacacacacacagatctgacgtaatcaaactccagcccttgcccgtgatggctccttggggtctgcctgcccacccacatgagcccgcgagtatggcagcaggacaagccagcggtggaagtcattctgatatggagttggcattggaagcttattctttttgttcactggagagagagagaactgtttacagttaatctgtgtctaattatctgattttttttattggtcttgtggtctttttaccccccctttcccctccctccttgaaggctaccccttgggaaggctggtgccccatgccccattacaggctcacacccggtctgatcaggctgagttttgtatgtatctatctgttaatgcttgttacttttaactaatcagatctttttacagtatccatttattatgtaatgcttcttagaaaagaatcttatagtacatgttaatatatgcaaccaattaaaatgtataaattagtgtaagaaattcttggattatgtgtttaagtcctgtaatgcaggcctgtaaggtggagggttgaaccctgtttggattgcagagtgttactcagaattgggaaatccagctagcggcagtattctgtacagtagacacaagaattatgtacgccttttatcaaagacttaagagccaaaagcttttcatctctccaggggaaaaactgtctagttcccttctgtgtctaaattttccaaaacggttgatttgcataatacagtggtatgtgcaatggataaattgccgttatttcaaaaattaaaattctcattttctttcttttttttcccccctgctccacacttcaaaactcccgttagatcagcattctactacaagagtgaaaggaaaaccctaacagatctgtcctagtgattttacctttgttctagaaggcgctcctttcagggttgtggtattcttaggttagcggagctttttcctcttttccccacccatctccccaatattgcccattattaattaacctctttctttggttggaaccctggcagttctgctcccttcctaggatctgcccctgcattgtagcttgcttaacggagcacttctcctttttccaaaggtctacattctagggtgtgggctgagttcttctgtaaagagatgaacgcaatgccaataaaattgaacaagaacaatgaaaaaaaaaaaaaaaaa

SEQ ID NO: 175 - protein, 231 aa, Homo sapiens [sequence omitted]

SEQ ID NO: 176 - DNA, 2267 bp, Homo sapiens
  CDS (97)..(2127)
gcataggctaggtagcgaggccgcgtgtgaatcggccgaggccgagtttctgcgcttccttctccctctctccagacgtcgtggtcgttcggtcctatgtcgcgccgggccctccggaggctgaggggggaacagcgcggccaggagcccctcgggcccggcgccttgcatttcgatctccgtgatgacgatgacgcggaagaagaagggcccaagcgggagcttggtgtccggcgtcccgggggcgcagggaaggagggcgtccgagtcaacaaccgcttcgagctgataaacattgacgatcttgaggatgaccctgtggtgaacggggagaggtctggctgtgcgctcacagacgctgtggcaccagggaacaaaggaaggggtcagcgtggaaacacagagagcaagacggatggagatgacaccgagacagtgccctcagagcagtctcatgcaagtggcaaactccggaagaagaaaaaaaaacagaaaaacaagaaaagcagcacgggagaagcatcggaaaacggactagaagatatcgatcgcatcctagagaggattgaggacagcactgggttgaaccgtcccggcccagctcccctgagctccaggaagcacgttctctacgtggagcacagacacttgaatccagacacagaactgaaaaggtattttggtgcccgggcaatcctgggggagcaaaggccacggcagagacaacgtgtgtaccccaagtgcacatggctgaccacccctaaaagcacctggccccgctacagcaaaccaggtctgtccatgcggctgctggaatcaaaaaaaggcctctccttctttgcgtttgagcacagtgaggagtaccagcaggctcagcacaagttcctggtggccgtggagtctatggagccgaacaacatcgtggttctgctccagacgagcccttaccacgttgactcactcctgcagctcagcgatgcctgccgctttcaagaggatcaggagatggctcgagacctcgtagagagagcgctgtacagcatggaatgtgcgttccaccccctgttcagtctcaccagtggggcctgccggctggattaccgcagacccgagaacaggagcttctacctggccctctacaagcagatgagcttcctggagaagcgaggctgcccgcgcacggcgctggagtactgcaagctcatcctgagtctcgagccggatgaggaccccctctgcatgctgctgctcatcgaccacctggccttgcgggcccggaactacgagtacctgatccgcctcttccaggagtgggaggctcatcggaacctgtcccagctccctaattttgccttctctgttccactggcgtatttcctgctgagccagcagacagacctccctgagtgtgagcagagctctgccaggcagaaggcctctctcctgatacagcaggcgctcaccatgttccctggagtcctcctgcccctgctcgagtcttgcagtgtgcggcccgacgccagcgtttccagtcaccgcttctttggacccaatgctgaaataagccagccccctgccctgagccagctggtgaacctgtaccttgggaggtcacactttctctggaaagagcccgccaccatgagctggctggaggagaacgtccacgaggttctgcaagcagtggacgccggggacccagccgtggaagcctgtgagaaccggcggaaggtgctctaccagcgtgcacccaggaatatccaccgccatgtgatcctctctgagatcaaggaagccgtcgctgccctgcccccggacgtgaccacgcagtctgtgatggggtttgatcctctgcctccttcggacacaatctactcctacgtcaggccagagaggctaagtcctatcagccatggaaacaccattgctctcttcttccggtcactgttgccaaactataccatggagggggagaggcccgaggaaggagtggctgggggtctgaaccgcaaccagggcctgaacaggctgatgctggctgtgcgcgacatgatggccaacttccacctcaacgacctggaggcgccgcacgaggacgacgctgagggggagggggagtgggactgagcgtccgcagaggtgaccgaaaagccgtatgatgatgttcccgatttctctgttggtcggagtcggccagttgcctgaagtagggaagctgagtgtgtcgctccctggtccactgtttctcctataaatgtaaatgggtc

SEQ ID NO: 177 - protein, 676 aa, Homo sapiens
MSRRALRRLRGEQRGQEPLGPGALHFDLRDDDDAEEEGPKRELGVRRPGGAGKEGVRVNNRFELINIDDLEDDPVVNGERSGCALTDAVAPGNKGRGQRGNTESKTDGDDTETVPSEQSHASGKLRKKKKKQKNKKSSTGEASENGLEDIDRILERIEDSTGLNRPGPAPLSSRKHVLYVEHRHLNPDTELKRYFGARAILGEQRPRQRQRVYPKCTWLTTPKSTWPRYSKPGLSMRLLESKKGLSFFAFEHSEEYQQAQHKFLVAVESMEPNNIVVLLQTSPYHVDSLLQLSDACRFQEDQEMARDLVERALYSMECAFHPLFSLTSGACRLDYRRPENRSFYLALYKQMSFLEKRGCPRTALEYCKLILSLEPDEDPLCMLLLIDHLALRARNYEYLIRLFQEWEAHRNLSQLPNFAFSVPLAYFLLSQQTDLPECEQSSARQKASLLIQQALTMFPGVLLPLLESCSVRPDASVSSHRFFGPNAEISQPPALSQLVNLYLGRSHFLWKEPATMSWLEENVHEVLQAVDAGDPAVEACENRRKVLYQRAPRNIHRHVILSEIKEAVAALPPDVTTQSVMGFDPLPPSDTIYSYVRPERLSPISHGNTIALFFRSLLPNYTMEGERPEEGVAGGLNRNQGLNRLMLAVRDMMANFHLNDLEAPHEDDAEGEGEWD

SEQ ID NO: 178 - DNA, 933 bp, Homo sapiens
  CDS (11)..(598)
ggcgctcacaatggagctctcggagtctgtgcagaaaggcttccagatgctggcggatccccgctccttcgactccaacgccttcacgcttctcctccgggcggcattccagagtctgctggacgcccaggcggacgaggccgtgttagatcatccagacttgaaacatatcgacccagtggttttaaaacattgtcatgcagcagctgcaacttacatactagaggcaggaaagcaccgagctgacaagtcaactctaagcacttatctagaagactgtaaatttgacagagagcgaatagaactgttttgcacggaatatcagaataataagaattccctagaaatcctactgggaagtataggcagatctctccctcatataacggatgtttcttggcgcttggaatatcagataaagaccaatcaacttcataggatgtacagacctgcatatttggtgaccttaagtgtacagaacactgattccccatcctatccagagattagttttagttgcagcatggaacaattacaggacttggtggggaaacttaaagatgcttcgaaaagcctggaaagagcaactcagttgtaacttggggaagttaacgatccgcccgagtgcagaggaaaaccagaaacgccttgccttcagctgaaccaccgtttgtgcgagctggatgtccttttcagtagaaaagaattttccttttgaatttataccattcatcaattttgacactttaaaaacgtgtgaaagggttaagagggaaagatactgcccaagtatttgaatcgtttagtagtaactgtccatttatcctattttgatctttttcaagtcttctgaaaggaagtagacagtattacaccctgaataaataaggtgttgttttccaaaaaaaaaaaaaaaaaaaaaaaaaaaaaaaa

SEQ ID NO: 179 - protein, 195 aa, Homo sapiens
MELSESVQKGFQMLADPRSFDSNAFTLLLRAAFQSLLDAQADEAVLDHPDLKHIDPVVLKHCHAAAATYILEAGKHRADKSTLSTYLEDCKFDRERIELFCTEYQNNKNSLEILLGSIGRSLPHITDVSWRLEYQIKTNQLHRMYRPAYLVTLSVQNTDSPSYPEISFSCSMEQLQDLVGKLKDASKSLERATQL

SEQ ID NO: 180 - DNA, 683 bp, Homo sapiens
  misc_feature (455)..(455): n is a, c, g, or t
cggacgcgtgggtttgagttcaacctttatacgtgtggcttggtcacttcgtggctaaggtaagaacgtgcttgtggaagacaagtctgtggcttggtgagtctgtgtggccagcagcctctgatctgtgcagggtattaacgtgtcagggctgagtgttctgggatttctctagaggctggcaagaaccagttgtttgtcttgcgggtctgtcagggttggaaagtccaagccgtaggacccagtttcctttcttagctgatgtctttggccagaacaccgtgggctgttacttgctttgagttggaagcggtttgcatttacgcctgtaaatgtattcattcttaatttatgtaaggtttttttgtacgcaattctcgattctttgaagagatgacaacaaatttggttttctactgttatgtgagaacattaggccccagcaacacgtcatngtgtaaggaaaacataaaagtgctgccgtaaccaaaaaaaaaaaaaaaaaaaaaaaaacaaacaataaaagacaccaacataaaagacacaaccgacaccaaagcaacaagagaacgacgcaacgcaagaccaagacgagacgcacgcccacaccccaagaccgcgcagcaagaggaggaaggcagacgcggaggcgagaccctcacaccaggcagcgccgcgccgcg

SEQ ID NO: 181 - DNA, 925 bp, Homo sapiens
  CDS (24)..(818)
ttttttctgctaccgtgactaagatggaagcgtttttggggtcgcggtccggactttgggcggggggtccggccccaggacagttttaccgcattccgtccactcccgattccttcatggatccggcgtctgcactttacagaggtccaatcacgcggacccagaaccccatggtgaccgggacctcagtcctcggcgttaagttcgagggcggagtggtgattgccgcagacatgctgggatcctacggctccttggctcgtttccgcaacatctctcgcattatgcgagtcaacaacagtaccatgctgggtgcctctggcgactacgctgatttccagtatttgaagcaagttctcggccagatggtgattgatgaggagcttctgggagatggacacagctatagtcctagagctattcattcatggctgaccagggccatgtacagccggcgctcgaagatgaaccctttgtggaacaccatggtcatcggaggctatgctgatggagagagcttcctcggttatgtggacatgcttggtgtagcctatgaagccccttcgctggccactggttatggtgcatacttggctcagcctctgctgcgagaagttctggagaagcagccagtgctaagccagaccgaggcccgcgacttagtagaacgctgcatgcgagtgctgtactaccgagatgcccgttcttacaaccggtttcaaatcgccactgtcaccgaaaaaggtgttgaaatagagggaccattgtctacagagaccaactgggatattgcccacatgatcagtggctttgaatgaaatacagatgcattatccagaactgaagttgccctacttttaactttgaacttggctagttcaaagatagactcttcttttgtaaagtaaataaattcttcaaaatg

SEQ ID NO: 182 - protein, 264 aa, Homo sapiens
MEAFLGSRSGLWAGGPAPGQFYRIPSTPDSFMDPASALYRGPITRTQNPMVTGTSVLGVKFEGGVVIAADMLGSYGSLARFRNISRIMRVNNSTMLGASGDYADFQYLKQVLGQMVIDEELLGDGHSYSPRAIHSWLTRAMYSRRSKMNPLWNTMVIGGYADGESFLGYVDMLGVAYEAPSLATGYGAYLAQPLLREVLEKQPVLSQTEARDLVERCMRVLYYRDARSYNRFQIATVTEKGVEIEGPLSTETNWDIAHMISGFE

SEQ ID NO: 183 - DNA, 3465 bp, Homo sapiens
  CDS (219)..(2639)
ctcgcgccaggcgagtctccgcgtctccctcgcgaactcggtgaaaggaattggcgccgttcgacaccaggcggatccgctctgcagcacgaacccatctccagccgcagccgcagccgccgcccgggccgaggagcagccgcagcagccgccaccagtggccgagtgagcggagccgagtttgaggcagcgcctagcggtgaatcggggccctcaccatgagttcctcgcctgttaatgtaaaaaagctgaaggtgtcggagctgaaagaggagctcaagaagcgacgcctttctgacaagggtctcaaggccgagctcatggagcgactccaggctgcgctggacgacgaggaggccgggggccgccccgccatggagcccgggaacggcagcctagacctgggcggggattccgctgggcgctcgggagcaggcctcgagcaggaggccgcggccggcggcgatgaagaggaggaggaagaggaagaggaggaggaaggaatctccgctctggacggcgaccagatggagctaggagaggagaacggggccgcgggggcggccgactcgggcccgatggaggaggaggaggccgcctcggaagacgagaacggcgacgatcagggtttccaggaaggggaagatgagctcggggacgaagaggaaggcgcgggcgacgagaacgggcacggggagcagcagcctcaaccgccggcgacgcagcagcaacagccccaacagcagcgcggggccgccaaggaggccgcggggaagagcagcggccccacctcgctgttcgcggtgacggtggcgccgcccggggcgaggcagggccagcagcaggcgggaggggacggcaaaacagaacagaaaggcggagataaaaagaggggtgttaaaagaccacgagaagatcatggccgtggatattttgagtacattgaagagaacaagtatagcagagccaaatctcctcagccacctgttgaagaagaagatgaacacttcgatgacacagtggtttgtcttgatacttataattgtgatctacattttaaaatatcaagagatcgtctcagtgcttcttcccttacaatggagagttttgcttttctttgggctggaggaagagcatcctatggtgtgtcaaaaggcaaagtgtgttttgagatgaaggttacagagaagatcccagtaaggcatttatatacaaaagatattgacatacatgaagttcgtattggctggtcactaactacaagtggaatgttacttggtgaagaagaattttcttatgggtattctctaaaaggaataaaaacatgcaactgtgagactgaagattatggagaaaagtttgatgaaaatgatgtgattacatgttttgctaactttgaaagtgatgaagtagaactctcgtatgctaagaatggacaagatcttggcgttgccttcaaaatcagtaaggaagttcttgctggacggccactgttcccgcatgttctctgccacaactgtgcagttgaatttaattttggtcagaaggaaaagccatattttccaatacctgaagagtatactttcatccagaacgtccccttagaggatcgagttagaggaccaaaggggcctgaagagaagaaagattgtgaagttgtgatgatgattggcttgccaggagctggaaaaactacctgggttactaaacatgcagcagaaaatccagggaaatataacattcttggcacaaatactattatggataagatgatggtggcaggttttaagaagcaaatggcagatactggaaaactgaacacactgttgcagagagccccccagtgtcttgggaaatttattgagattgctgcccgaaagaagcgaaattttattctggatcagacaaatgtgtctgctgctgcccagaggagaaaaatgtgcctgtttgcaggcttccagcgaaaagctgttgtagtttgcccaaaagatgaagactataagcaaagaacacagaagaaagcagaagtagaggggaaagacctaccagaacatgcggtcctcaaaatgaaaggaaactttaccctcccagaggtagctgagtgctttgatgaaataacctatgttgaacttcagaaggaagaagcccaaaaactcttggagcaatataaggaagaaagcaaaaaggctcttccaccagaaaagaaacagaacactggctcaaagaaaagcaataaaaataagagtggcaagaaccagtttaacagaggtggtggccatagaggacgtggaggattcaatatgcgtggtggaaatttcagaggaggagcccctgggaatcgtggcggatataataggaggggcaacatgccacagagaggtggtggcggtggaggaagtggtggaatcggctatccataccctcgtgcccctgtttttcctggccgtggtagttactcaaacagagggaactacaacagaggtggaatgcccaacagagggaactacaaccagaacttcagaggacgaggaaacaatcgtggctacaaaaatcaatctcagggctacaaccagtggcagcagggtcaattctggggtcagaagccatggagtcagcattatcaccaaggatattattgaatacccaaataaaacgaactgatacatatttctccaaaaccttcacaagaagtcgactgttttctttagtaggctaactttttaaacattccacaagaggaagtgcctgcgggttccttttttagaagctttgtgggttgattttttttcttttcttttttgtacatttttaattgcagtttaaaagtgaatcgtaagagaacctcagcattgtgcacgataagagaatgtgtcagtatttcagggttctacattttatctgtaaaatgtgacttttttttttttttatcacaacagaagtaaaatgttgctttgtacctggtgtcttttattaagaatttactccccccatttctcacagagaataacagtcgggagtcattgtcacaatataatagaaatgttagcaaccagattcatgtaaggactaagtggtcctcatgaattgcattaagactctgtactgctcatattacactccatcctctctgtagtttgctgggtagtggagggggtaagctaaatcatagtttctgacaataactgggaaggttttttcttaaaataacaatggaattggtataattgggattgaaaactaaaacttggaactaagatagagaagatggagtgtatgtagaagggctgttaaaaatgtaaaacttggttgcattatttgtggaggctcaaacttgtgaaggttaataccataatttttccatttgttctgcattttgattctgaaaagaaagctggctttgcccatttcttattaaaaaaacttgttgtaaaaaaaaaaaaaaaaaaaaaaaaaaaaaaaaaaaaa

SEQ ID NO: 184 - protein, 806 aa, Homo sapiens
MSSSPVNVKKLKVSELKEELKKRRLSDKGLKAELMERLQAALDDEEAGGRPAMEPGNGSLDLGGDSAGRSGAGLEQEAAAGGDEEEEEEEEEEEGISALDGDQMELGEENGAAGAADSGPMEEEEAASEDENGDDQGFQEGEDELGDEEEGAGDENGHGEQQPQPPATQQQQPQQQRGAAKEAAGKSSGPTSLFAVTVAPPGARQGQQQAGGDGKTEQKGGDKKRGVKRPREDHGRGYFEYIEENKYSRAKSPQPPVEEEDEHFDDTVVCLDTYNCDLHFKISRDRLSASSLTMESFAFLWAGGRASYGVSKGKVCFEMKVTEKIPVRHLYTKDIDIHEVRIGWSLTTSGMLLGEEEFSYGYSLKGIKTCNCETEDYGEKFDENDVITCFANFESDEVELSYAKNGQDLGVAFKISKEVLAGRPLFPHVLCHNCAVEFNFGQKEKPYFPIPEEYTFIQNVPLEDRVRGPKGPEEKKDCEVVMMIGLPGAGKTTWVTKHAAENPGKYNILGTNTIMDKMMVAGFKKQMADTGKLNTLLQRAPQCLGKFIEIAARKKRNFILDQTNVSAAAQRRKMCLFAGFQRKAVVVCPKDEDYKQRTQKKAEVEGKDLPEHAVLKMKGNFTLPEVAECFDEITYVELQKEEAQKLLEQYKEESKKALPPEKKQNTGSKKSNKNKSGKNQFNRGGGHRGRGGFNMRGGNFRGGAPGNRGGYNRRGNMPQRGGGGGGSGGIGYPYPRAPVFPGRGSYSNRGNYNRGGMPNRGNYNQNFRGRGNNRGYKNQSQGYNQWQQGQFWGQKPWSQHYHQGYY

SEQ ID NO: 185 - DNA, 1092 bp, Homo sapiens
ttttatttttccttacacaatgacgtgttgctggggctaatgttctcacataacagtagaaaaccaaaatttgttgtcatctcttcaaagaatcgagaattgcgtacaaaaaaaaccttacataaattaagaatgaatacatttacaggcgtaaatgcaaaccgcttccaactcaaagcaagtaacagcccacggtgttctggccaaagacatcagctaagaaaggaaactsggtcctacggcttgggctttccaaccctgacagacccgcaagacaaaacaactggttcttgccagcctctagagaaatcccagarcactcagccctgacacgttaataccctgcacagatcagaggctgctggscacacagactcaccaagccacagacttgtcttccacaagcacgttcttaccttagccacgaagkaccaagccacacgtactaaaggttgaactcaaagatatgtacagggtattaaacaaataccaaggggaacagttaacttcaatacaaggtcaaaatcagcaacaagttctacaatccagtgctgatatcagatacaagcttcaaggacaatttcttttcgaaggcttattccagtttcgtgaggctagcatgaggtgtgtgcatttgcsaggggcaaatttctattctcaattaacccatgcagcaaatgctacgcatctgctgagtccgtttagaagcatttgcggtggacgatggaggggcgcgactcgtcgtactcctgcttgctaatccacatctgctggaaggtggacagtgaggccaggatggagccaccgatccacaccgagtacttgcgctctgggggtgcgatgatcttgatcttcatggtgctgggcgccagggcggtgatctccttctgcatcctgtcggcaatgcccggatacatggtggtgccgcccgacagcaccgtgttggcgtacaggtctttgcggatgtccacgtcacacttcatgatggagttgaaggtggtctcgtggatgcgscagattcatacccaggaaggaggctggacaggcctycggacacggaacgctcattgcaatggtgtgactggcatcggg

SEQ ID NO: 186 - DNA, 600 bp, Homo sapiens
  CDS (27)..(227)
ctcttcgttaagtcggccttcccaacatggcgcagtctattaacatcacggagctgaatctgccgcagctagaaatgctcaagaaccagctggaccaggaagtggagttcttgtccacgtccattgctcagctcaaagtggtacagaccaagtatgtggaagccaaggactgtctgaacgtgctgaacaagagcaacgaggatgtatgtccctgggaagctgcatgatgtggaacacgtgctcatcgatgtgggaactgggtactatgtagagaagacagctgaggatgccaaggacttcttcaagaggaagatagattttctaaccaagcagatggagaaaatccaaccagctcttcaggagaagcacgccatgaaacaggccgtcatggaaatgatgagtcagaagattcagcagctcacagccctgggggcagctcaggctactgctaaggcctgagagtttttgcagaaatggggcagagggacaccctttgggcgtggcttcctggtgatgggaagggtcttgtgttttaatgccaataaatgtgccagctgggcaaaaaaaaaaaaaaaaaaaaaaaaaaaaaaaaaaaaaaaa

SEQ ID NO: 187 - protein, 66 aa, Homo sapiens
MAQSINITELNLPQLEMLKNQLDQEVEFLSTSIAQLKVVQTKYVEAKDCLNVLNKSNEDVCPWEAA

SEQ ID NO: 188 - DNA, 1025 bp, Homo sapiens
atatcagcactggattgtagaacttgttgctgattttgaccttgtattgaagttaactgttcccctggtattaacgtgtcagggctgagtgttctgggatttctctagaggctggcaagaaccagttgtttgtcttgcgggtctgtcagggttggaaagtccaagccgtaggacccagtttcctttcttagctgatgtctttggccagaacaccgtgggctgttacttgctttgagttggaagcggtttgcatttacgcctgtaaatgtattcattcttaatttatgtaaggttttttttgtacgcaattctcgattctttgaagagatgacaacaaattttggttttctactgttatgtgagaacattaggccccagcaacacgtcattgtgtaaggaaaaataaaagtgctgccgtaaccaaaaaaaaaaaaaaaaaaaagaaaaaaacaatagagtagaacaaaaaaaaaaaaaaactggttgggggtgcttttttgttggggggggaggaaaaaaggggtgatgagagggggggcatgttgtcaattttggttttttgggaccccttttttttgaacagggggcagaaagtcgagagggccccaaaaggagggggggattatatttggagacggcctgttgctgctagtgttcttgaagtacctcgcaggatgcgaggaacgagagcaagagggaacaagagacaagaacagcaaaggagaagaggcagggccagcgacaacgaggcagagggggaaggagcacaaacaagagcaagaagcgaggagtgagcgaaaccaaagaaagaagaacagaacggactcaccaggagcacaagccacaacaaggcttgagagaacactctgacgctcagcgaggccgatcgagagaggagagagggcgcgcaggcagggcatcgaacaacgaccagccacacagcagggagacagacgagcaacaacagcagagctagagacaggggcgaaacggaggaggcaccccctagacgaccgcacgggcgg

SEQ ID NO: 189 - DNA, 1757 bp, Homo sapiens
  CDS (76)..(621)
gcaaaaccaacgcctggctcggagcagcagcctctgaggtgtccctggccagtgtccttccacctgtccacaagcatggggaacatcttcgccaacctcttcaagggcctttttggcaaaaaagaaatgcgcatcctcatggtgggcctggatgctgcagggaagaccacgatcctctacaagcttaagctgggtgagatcgtgaccaccattcccaccataggcttcaacgtggaaaccgtggagtacaagaacatcagcttcactgtgtgggacgtgggtggccaggacaagatccggcccctgtggcgccactacttccagaacacacaaggcctgatcttcgtggtggacagcaatgacagagagcgtgtgaacgaggcccgtgaggagctcatgaggatgctggccgaggacgagctccgggatgctgtcctcctggtgttcgccaacaagcaggacctccccaacgccatgaatgcggccgagatcacagacaagctggggctgcactcactacgccacaggaactggtacattcaggccacctgcgccaccagcggcgacgggctctatgaaggactggactggctgtccaatcagctccggaaccagaagtgaacgcgacccccctccctctcactcctcttgccctctgctttactctcatgtggcaaacgtgcggctcgtggtgtgagtgccagaagctgcctccgtggtttggtcaccgtgtgcatcgcaccgtgctgtaaatgtggcagacgcagcctgcggccaggctttttatttaatgtaaatagtttttgtttccaatgaggcagtttctggtactcctatgcaatattactcagctttttttattgtaaaaagaaaaatcaactcactgttcagtgctgagaggggatgtaggcccatgggcacctggcctccaggagtcgctgtgttgggagagccggccacgcccttggctttagagctgtgttgaaatccattttggtggttggtttttaacccaaactcagtgcattttttaaaatagttaagaatccaagtcgagaacacttgaacacacagaagggagaccccgcctagcatagatttgcagttacggcctggatgccagtcgccagcccagctgttcccctcgggaacatgaggtggtggtggcgcagcagactgcgatcaattctgcatggtcacagtagagatccccgcaactcgcttgtccttgggtcaccctgcattccatagccatgtgcttgtccctgtgctcccacggttcccaggggccaggctgggagcccacagccaccccactatgccgcaggccgccctacccaccttcaggcagcctatgggacgcagggccccatctgtccctcggtcgccgtgtggccagagtgggtccgtcgtccccaacactcgtgctcgctcagacactttggcaggatgtctggggcctcaccagcaggagcgcgtgcaagccgggcaggcggtccacctagacccacagcccctcgggagcaccccacctctgtgtgtgatgtagctttctctccctcagcctgcaagggtccgatttgccatcgaaaaagacaacctctacttttttcttttgtattttgataaacactgaagctggagctgttaaatttatcttggggaaacctcagaactggtctatttggtgtcgtggaacctcttactgctttcaatacacgattagtaatcaaaaaaaaaaaaaaaaaaaaaaaaaa

SEQ ID NO: 190 - protein, 181 aa, Homo sapiens
MGNIFANLFKGLFGKKEMRILMVGLDAAGKTTILYKLKLGEIVTTIPTIGFNVETVEYKNISFTVWDVGGQDKIRPLWRHYFQNTQGLIFVVDSNDRERVNEAREELMRMLAEDELRDAVLLVFANKQDLPNAMNAAEITDKLGLHSLRHRNWYIQATCATSGDGLYEGLDWLSNQLRNQK

SEQ ID NO: 191 - DNA, 478 bp, Homo sapiens
  CDS (84)..(161)
acccggcgctccattaaatagccgtagacggaacttcgcctttctctcggccttagcgccatttttttggaaacctctgcgccatgagagccaagtggaggaagaagcgaatgcgcaggctgaagcgcaaaagaagaaagatgaggcagaggtccaagtaaaccgctagcttgttgcaccgtggaggccacaggagcagaaacatggaatgccagacgctggggatgctggtacaagttgtgggactgcatgctactgtctagagcttgtctcaatggatctagaacttcatcgccctctgatcgccgatcacctctgagacccaccttgctcataaacaaaatgcccatgttggtcctctgccctggacctgtgacattctggactatttctgtgtttatttgtggccgagtgtaacaaccatataataaatcacctcttccgctgttttagctgaagaattaaatcaaaaaaaaaa

SEQ ID NO: 192 - protein, 25 aa, Homo sapiens [sequence omitted]

SEQ ID NO: 193 - DNA, 1593 bp, Homo sapiens
  CDS (48)..(1232)
ccgccgccgccgcagcccggccgcgccccgccgccgccgccgccgccatgggctgcctcgggaacagtaagaccgaggaccagcgcaacgaggagaaggcgcagcgtgaggccaacaaaaagatcgagaagcagctgcagaaggacaagcaggtctaccgggccacgcaccgcctgctgctgctgggtgctggagaatctggtaaaagcaccattgtgaagcagatgaggatcctgcatgttaatgggtttaatggagagggcggcgaagaggacccgcaggctgcaaggagcaacagcgatggtgagaaggcaaccaaagtgcaggacatcaaaaacaacctgaaagaggcgattgaaaccattgtggccgccatgagcaacctggtgccccccgtggagctggccaaccccgagaaccagttcagagtggactacatcctgagtgtgatgaacgtgcctgactttgacttccctcccgaattctatgagcatgccaaggctctgtgggaggatgaaggagtgcgtgcctgctacgaacgctccaacgagtaccagctgattgactgtgcccagtacttcctggacaagatcgacgtgatcaagcaggctgactatgtgccgagcgatcaggacctgcttcgctgccgtgtcctgacttctggaatctttgagaccaagttccaggtggacaaagtcaacttccacatgtttgacgtgggtggccagcgcgatgaacgccgcaagtggatccagtgcttcaacgatgtgactgccatcatcttcgtggtggccagcagcagctacaacatggtcatccgggaggacaaccagaccaaccgcctgcaggaggctctgaacctcttcaagagcatctggaacaacagatggctgcgcaccatctctgtgatcctgttcctcaacaagcaagatctgctcgctgagaaagtccttgctgggaaatcgaagattgaggactactttccagaatttgctcgctacactactcctgaggatgctactcccgagcccggagaggacccacgcgtgacccgggccaagtacttcattcgagatgagtttctgaggatcagcactgccagtggagatgggcgtcactactgctaccctcatttcacctgcgctgtggacactgagaacatccgccgtgtgttcaacgactgccgtgacatcattcagcgcatgcaccttcgtcagtacgagctgctctaagaagggaacccccaaatttaattaaagccttaagcacaattaattaaaagtgaaacgtaattgtacaagcagttaatcacccaccatagggcatgattaacaaagcaacctttcccttcccccgagtgattttgcgaaacccccttttcccttcagcttgcttagatgttccaaatttagaaagcttaaggcggcctacagaaaaaggaaaaaaggccacaaaagttccctctcactttcagtaaaaataaataaaacagcagcagcaaacaaataaaatgaaataaaagaaacaaatgaaataaatattgtgttgtgcagcattaaaaaaaatcaaaataaaaattaaatgtgagcaaag

SEQ ID NO: 194 - protein, 394 aa, Homo sapiens
MGCLGNSKTEDQRNEEKAQREANKKIEKQLQKDKQVYRATHRLLLLGAGESGKSTIVKQMRILHVNGFNGEGGEEDPQAARSNSDGEKATKVQDIKNNLKEAIETIVAAMSNLVPPVELANPENQFRVDYILSVMNVPDFDFPPEFYEHAKALWEDEGVRACYERSNEYQLIDCAQYFLDKIDVIKQADYVPSDQDLLRCRVLTSGIFETKFQVDKVNFHMFDVGGQRDERRKWIQCFNDVTAIIFVVASSSYNMVIREDNQTNRLQEALNLFKSIWNNRWLRTISVILFLNKQDLLAEKVLAGKSKIEDYFPEFARYTTPEDATPEPGEDPRVTRAKYFIRDEFLRISTASGDGRHYCYPHFTCAVDTENIRRVFNDCRDIIQRMHLRQYELL

SEQ ID NO: 195 - DNA, 308 bp, Homo sapiens
cgcctactactactatacgggggcgagatgacgacagaagggatgccaaatctgtcaagatcaagaaaaataaggacaacgtgaagtttaaagttcgatgcagcagatacctttacaccctggtcatcactgacaaagagaaggcagagaaactgaagcagtccctgcccccggtttggcagtgaaggaactgaaatgaaccagacacactgattggaactgtattatattaaaatactaaaaatcctaaaaaaaaaaaaaaaaagaaaaaaaaaataaaaaaaaaaaaaaaaaaaaagtcgtatcga

SEQ ID NO: 196 - DNA, 5160 bp, Homo sapiens
  CDS (304)..(3555)
gttccaggtgcaagcgccgggtttgctgcccgctgggcgcccctgcagcggcccgagctgtggccggcgtggatgaggggcaggcgaggcagggccgcccctccagtattgccgcccctcccgccccagggcagggctgggagggtacagcccgggggcgggctcgggtcgcctcccggccgccgcgtcctcgctgccccgggccgggcgggcgggcgccgagagcctcccagcccgccccgtgccccgcccgcccggctgcttccgcggcggcgctgcccgcacatgggctaggctgccaggatgttcagcttcgaaggcgacttcaagacgcggcccaaggtgtcccttggcggcgcgagcaggaaggaggaaaaggcttctcttttacatcgtactcaggaagaaagaagaaagagagaggaagaaaggcgaaggttgaaaaatgcaataattatccagtcatttattcgaggctatagagacagaaaacagcaatattccatccaaagaagtgcatttgatcgctgtgctaccttgtcacagtccgggggcgcttttcccattgctaatggccccaaccttacccttttggtaaggcagcttctgtttttttacaaacaaaatgaagactcaaaacgtttgatatggctgtatcagaacttaattaaacacagctctctgtttgtcaagcagttggatggatctgagagacttacatgcttatttcagataaaaagattgatgagcctctgttgcaggttgctgcaaaactgtaatgatgacagtttgaatgttgcacttccaatgagaatgcttgaagtattttcgtctgagaatacttacttgcctgttttacaagatgctagctatgtggtgtcagtgattgaacaaattttgcactacatgattcacaatgggtattataggtctctatatttgttgattaacagcaagcttccatcaagtattgaatattctgatttatctcgagttcctatagcaaaaattttgctagagaatgttctaaaaccattgcactttacttacaactcctgtccggaaggtgcgaggcaacaagtttttacagccttcacagaggagtttctggcagcaccttttacagatcagatttttcatttcatcattccggcgcttgcagatgcgcagaccgttttcccttacgagccctttctgaatgcactgttgttaatagagagtagatgttcaagaaagagtggtggagcaccctggcttttctatttcgttttaactgttggcgaaaattatttgggggccctctctgaggaagggctgctggtgtatttgcgggtgctgcagaccttcctctctcagttaccagtctctcctgccagcgcgagctgtcacgactcagccagtgactctgaggaggagagtgaagaagccgacaagccctcaagcccggaggatggcagactgtcagtatcatacataacagaggaatgcctgaagaagctggacacaaagcagcagaccaacaccctgctcaacctggtgtggagggactctgcgagcgaggaggtcttcaccaccatggcctccgtctgccacacgctgatggtgcagcaccgcatgatggtacccaaagtcaggcttctctacagtttagcctttaatgccaggtttctgagacatctttggtttctaatatcttccatgtcaacacggatgatcacagggtctatggtaccgttgcttcaggtgatatccaggggttctcctatgtcttttgaagattctagtcgaatcatcccactcttttacctttttagctccttgtttagtcattcactaatttccatacatgataacgaattcttcggtgatcccatagaagttgtaggtcaaagacaatcatcaatgatgccttttactttagaagagctgataatgttgtctcgatgccttcgagatgcatgcctggggatcatcaagttggcttatccagaaaccaagccagaagttcgagaagaatatattacagcatttcagagtattggagttactactagctctgaaatgcaacaatgcatacagatggaacagaaaagatggattcagttatttaaggttatcaccaatctagtgaaaatgttgaagtccagagacacgaggagaaatttttgtcctccaaaccactggctgtcagaacaagaagatattaaagcagataaggtcactcagctctatgtgccagcatccagacatgtgtggaggttccggcggatggggaggataggcccgctgcagtccaccctggacgtgggtttggagtccccgccgctgtctgtgtctgaggaaagacagcttgctgtcctgacagagttgccttttgtggttccatttgaggaacgagtaaagatctttcagaggttgatttatgcagataagcaagaagttcaaggagatggtccatttctggatggaattaatgtcacaataagaagaaattacatttatgaagatgcttatgacaaactttctccagaaaatgagcctgatttgaaaaagcggatccgtgtgcacttgctcaatgcccatggcctggatgaagctggcattgatggtggtggtattttcagagagtttttaaatgaactactgaagtcaggatttaaccccaaccaggggttctttaagactactaatgaagggcttctgtaccccaacccggctgctcagatgcttgtgggagattcttttgccagacattactacttcctagccagaatgcttggaaaggctctctatgagaacatgctggtggagctgccctttgcaggcttctttctttccaagttgcttggaaccagtgccgacgtggacattcaccacctcgcctccctagaccctgaggtgtataagaatttgctctttctgaagagctacgaagacgatgtggaggagcttgggctgaacttcactgtggtgaacaatgacctgggagaggcgcaggtagttgaactaaaattcggtgggaaagacatccctgtcaccagcgccaaccggattgcgtacatccacttggtggcagactacaggctgaacaggcagatccgccagcactgcctggctttccgccagggccttgccaatgtcgtcagcctcgagtggctccgaatgtttgatcagcaagaaattcaggtattaatttctggtgcacaagttcccataagcctagaggacctaaaatcctttacaaactattcaggaggctattctgcagaccatcctgttattaaggtcttctggagagttgtggaagggttcactgatgaagaaaagcgcaaactgctgaagtttgtaacaagctgctctcgaccccctctcttggggtttaaggagttgtatcccgcattttgtattcacaacggaggctccgaccttgagcggctccccacagccagcacctgcatgaacctgctgaagctccccgagttctatgacgagacacttttgcgaagtaaacttctctatgcgattgaatgtgccgctggctttgagctgagctgaagctgatgctggggtcagacccctacagagaaccagtgcttccttcgtcagcagcgcctccccagacccacgaggatactcacactgcacgcctgaggctctcctaagctccttctttcattctgccattcctccctcccttccttttttaaatgatttttattacggtgtggtcacttatttagatggacattgcttttcaaataacttaaaataacacgttatgtgccatgtggctactttagtaatattgccaagaagagcacagtttttacactagtggcatctcagtgaaattaaccaaagatgaagctttggctttgctggtgagatcagagccctcctgagcaggcagcgccactccagggttcagacagggctgcacaggcggcagagatacagggtctgagggctgagacgccatggggccgctgctgcttatgtggttggattgtttacaagcctcattattaaaactgaaggcattttttttttctgctgcctttcccaaagtggttaggtttggaaaagagatgatgatggtaatattttatttgtgctttttaagccatttccccaaatgggactagcatgcttgttttcagtataccgtggcctgcctcatgatggtttggagatactgtctgtggatgtgaggtggggacttcattcattgtcctatttctatctccactttgtgcctggagagctttcaggggaggtggaggaggagggtctgccaagctactgcaacatctgtcacccactatacccagttacttgggggaggacagacactgtggtgtcattaaagttgtttgaaccaaagtggcggctgcatctttgtcccgatgctagccgtgccggtctcccatcatccgctcgccctcctttcccctgggctgcgcccacttgtcttcctggatatttgggggtgactcgccatgcttggcaccctctgcttcctggtgctgctctgactcgaagacgggacagtccctggtgcacatccagggaagaggagtgtcggtagttcttgcagtaggcactttatcaggacctgacctgttgctgggtgattttagtctctacaaacagaaagcgtttcaaagcgtcagctgtgggagcagagtgaccctttgctgatgctggggggaggggatctaaatcctcatttatctcttctatgtctagtattttactgtcactggaggctctgtgggctgtcatagttaattgaccataattagcaatatacttttaaagtgggaaagctgaatgacacttttaagacaatgaacattatcaaaacaaaatgtataatttcttaatttgaataataagcgtttaaatgctatttgtagtcttgatatacagaaataaaataattagggttggtcttttttattttaggttttatgttgaatgttctatatcttattagttaatttgtatattttattagtattttggaaatagcatatctgagactgaggagaaattgacaattcacttatttgtggtttttttctcagctattctgagcttatttatttatttgtatgttctaatggctaaacatttacattaaatattttttttccc

SEQ ID NO: 197 - protein, 1083 aa, Homo sapiens
MFSFEGDFKTRPKVSLGGASRKEEKASLLHRTQEERRKREEERRRLKNAIIIQSFIRGYRDRKQQYSIQRSAFDRCATLSQSGGAFPIANGPNLTLLVRQLLFFYKQNEDSKRLIWLYQNLIKHSSLFVKQLDGSERLTCLFQIKRLMSLCCRLLQNCNDDSLNVALPMRMLEVFSSENTYLPVLQDASYVVSVIEQILHYMIHNGYYRSLYLLINSKLPSSIEYSDLSRVPIAKILLENVLKPLHFTYNSCPEGARQQVFTAFTEEFLAAPFTDQIFHFIIPALADAQTVFPYEPFLNALLLIESRCSRKSGGAPWLFYFVLTVGENYLGALSEEGLLVYLRVLQTFLSQLPVSPASASCHDSASDSEEESEEADKPSSPEDGRLSVSYITEECLKKLDTKQQTNTLLNLVWRDSASEEVFTTMASVCHTLMVQHRMMVPKVRLLYSLAFNARFLRHLWFLISSMSTRMITGSMVPLLQVISRGSPMSFEDSSRIIPLFYLFSSLFSHSLISIHDNEFFGDPIEVVGQRQSSMMPFTLEELIMLSRCLRDACLGIIKLAYPETKPEVREEYITAFQSIGVTTSSEMQQCIQMEQKRWIQLFKVITNLVKMLKSRDTRRNFCPPNHWLSEQEDIKADKVTQLYVPASRHVWRFRRMGRIGPLQSTLDVGLESPPLSVSEERQLAVLTELPFVVPFEERVKIFQRLIYADKQEVQGDGPFLDGINVTIRRNYIYEDAYDKLSPENEPDLKKRIRVHLLNAHGLDEAGIDGGGIFREFLNELLKSGFNPNQGFFKTTNEGLLYPNPAAQMLVGDSFARHYYFLARMLGKALYENMLVELPFAGFFLSKLLGTSADVDIHHLASLDPEVYKNLLFLKSYEDDVEELGLNFTVVNNDLGEAQVVELKFGGKDIPVTSANRIAYIHLVADYRLNRQIRQHCLAFRQGLANVVSLEWLRMFDQQEIQVLISGAQVPISLEDLKSFTNYSGGYSADHPVIKVFWRVVEGFTDEEKRKLLKFVTSCSRPPLLGFKELYPAFCIHNGGSDLERLPTASTCMNLLKLPEFYDETLLRSKLLYAIECAAGFELS

SEQ ID NO: 198 - DNA, 1010 bp, Homo sapiens
tattttccagccttatgtgttacattattccaatgatacccaacagtttatttttattatttttttaaacaaaatttcacagttctgtaatgtaggcacttttattttcattgtgatttatatataaggtaatgtagggttatatttgggagtgactgcaagcatttttccatctgtgtgcaactaactgactctgttattgatcccttctcctgccctttcccaggtaatttaaattggtcatggtagatttttttcatagatttgaaaaacttttaggttgttaccaagtatgaagtataaatctggggaagaggttttatttacattttagggtgggtaagaaagccaccttgttacaaattttttaatttccaaaataatctatattaaatgagggtttctgatctgtactttgtgtttagctacctttttatatttaaaaaattaaaaatgaaaattacgttcttacaagcttaaagcttgatttgatctttgtttaaatgccaaaatgtacttaaatgagttacttagaatgccataaaattgcagtttcatgtatgtatataatcatgctcatgtatatttagttacgtataatgctttctgagtgagttttactcttaaatcatttggttaaatcatttggcttgctgtttactcccttctgtagtttttaattaaaaactttaaagataagtctacattaaacaatgatcacatctaaagctttatctttgtgtaatctaagtatatgtgagaaatcagaattggcataatttgtcttagttgatattcaaggctttaaaagtcattattcctgggcttggtaagtgaatttatgagatttactgctctagaaagtatagatggccaaaggaccgttatgtattgcttcctgattaccagtctgattataccatgtgtgctaatatactttttttgttatagattgtcttaatggtaggtcaagtaataaaaagagatgaaataatttaaaaaaaaaaaaa

SEQ ID NO: 199 - DNA, 538 bp, Homo sapiens
  CDS (29)..(421)
ggcacgaggctgaagatagatcgccatcatgaacgacaccgtaactatccgcactagaaagttcatgaccaaccgactacttcagaggaaacaaatggtcattgatgtccttcaccccgggaaggcgacagtgcctaagacagaaattcgggaaaaactagccaaaatgtacaagaccacaccggatgtcatctttgtatttggattcagaactcattttggtggtggcaagacaactggctttggcatgatttatgattccctggattatgcaaagaaaaatgaacccaaacatagacttgcaagacatggcctgtatgagaagaaaaagacctcaagaaagcaacgaaaggaacgcaagaacagaatgaagaaagtcagggggactgcaaaggccaatgttggtgctggcaaaaagtgagctggagattggatcacagccgaaggagtaaaggtgctgcaatgatgttagctgtggccactgtggatttttcgcaagaacattaataaactaaaaacttcaaaaaaaaaaaaaaaa

SEQ ID NO: 200 - protein, 130 aa, Homo sapiens
MNDTVTIRTRKFMTNRLLQRKQMVIDVLHPGKATVPKTEIREKLAKMYKTTPDVIFVFGFRTHFGGGKTTGFGMIYDSLDYAKKNEPKHRLARHGLYEKKKTSRKQRKERKNRMKKVRGTAKANVGAGKK

SEQ ID NO: 201 - DNA, 64183 bp, Homo sapiens
catattccaaatctagtgctgtacttgtccctgctccgcaattatcagcagtcagatttttgtacttttctggcaacctaagcttaggggtaccaagatcatcctcctgcctttccaacagtgtttgctcagcctgcaagtgtaagaggggaaaaaaaaaaagaaaaaaaagaggtttaattataatcacttctccagggactgctttcctctaatgatgtccacatcaagtgactccaaaataattcttcattctaaaagagagtaattctggccgggtgtggtggctcacgcactttgggaggccgaggtgggtggattgcctgagctcaggagttcaagaccagcctgggcaacatggagaaactccgtctctactaaaattacaaaaaattagccaaacgcggtggtgcgtgcctgtaatcccagctacttgggaggctgaggcacgagaattgcttaaaccctggaggcagaggttgcagttagccaagatcgtttcactacactccagcctgggcgacagagcaagactctgtctcaaaaataaataaataaataaataaataaataaataaataaataaataaataagagtaattcaaggccttgaatatcaaccagagtgagtgacagaaaggcttgataccagtatgtcactcacacctttcatgggtagacctttccaaaatcacccagtgtccccctctctgaagaccttcatctgtaaaacagaaataagaagcaactgtgctgaatgttcttagaaggtgtggtcataaactctattaatagacagtagagcctgttgttaactctgtctaaatctacacattaatttggaagtttcatcagtctgactcatattttcttttttctttctaataattcagtatcccagcctttacaccctcactcaacttctggcatggacatgctcagcattgccacacttgccaataaaggtaaaaactatacaattttttggcaggctttaataactttcataatgagctaccattcctgtcatttatttgatttgaacttgcaaaggcatcagtaaattaaaagaaagcatactgagatttggtggaggaaaaaaatgtcaattcccaaattggtcttttgggaattcaaaatacacaatagagcaacagctgttctagatttccatcagagattagcagataagttattattgaaattcaaagttgtgacatctttagataaatatttgcccttgattttcacagcctctgattcaacagaaatctggaagtgttcacagcttggcccggagaagatcgttttaaatctacagctttaaaatgtggttgaaaaggagcccaggttggattctgccagcaggtccgctggccgctgttacctccccactgtcaacgcctaggtctctgcctccagccctgtttcagcctgtccttgaggatttgcttcacctcatttactgagcttgccacagattcattacctggcatcagagctcccctctcactgagcctgcccagaggggtgccagtatactagccagatgccgctggagggactccacaataaagcctggctattaaagacttcaacagtctcataaagtcactttgccagctgtagagcacacaagtgcccacagatccaagcctccttccttccccaaagaaacaccttggataaagtcttggaatatcatccattagcacatggctccagccaacacatgaattcccttacaccagcacatggtctctctttcctgttcattcactttggaagacagtccttgaaatgacaaggcctggagtgtcttgtacaaccaccgccaatccggtttccagcagaggcttgtgggctagggagtgtatcgatttgtattgttaaaggaatttcctgctcctctcagtgtcagctgaagagccctctgcagtcattctcctattttgagagaagagaaacaagaggagacgaactcctggttccttcctacggggtgtatagaccagtgacaatgttagtcctacaatttggatttatttgtttgttttctaatcaccgccacttctccaagtacaaagtctgtgtctataattagatatcttctacatgttacaccggcaagtccatctcatcattttacagagggatggtgacttcctttagcgccccatactgaccgcggtccctcacctgctgactgattgacttataaatctgccccccacccacttgtctgtccattgaaggcaaattcgccatcgggaacacagtagtttctcaataactatctaatgcatggccacccttcccaggatttagaatatcaaagggacgtgttctttcctcccaaatcacctgcctgcgcttcccccagccgggtgccccagccttcacctcggtccggccaccacctcatcccgcttcttcgcggcttccaggcctcgggctgggatctcagcccctgcctgtaggtgcggcccagagggtgcgacacgcgtcggagcggggcagcggaggaggggacagggacgcggcagccacacccgcatctctttcccctctcgggcatccccgagggcccttctgcctccagttccttgagcccccgaagccccccatgcggcaagagcgagtcgcaggaacaagtggggaatcttggccgcggccccctcccccgccttataaaaaagaaattgacttttgtttggagtttgtgaaaagtggggctcggggcccagtcaatggggcgccccgcggcgcgggctgagtggagctagcgcgaaccgctcagccgcggccccaattaatccgccctttgtgcggcccgcccggccgcccccgccgcagccgcaccagcggcccattgttcggcctcgccgggccgcgggatttacccttttcaaacagccggttttgtccagggcagttcgagcggaagtttctcactgacaatttgccccaaatagatagatttgtcagaagcgaccttcgggaaggaagcaaaaagccaccggcccgaaggttgggcccaaaacagggactctgcgtcccacccgcggccgcgccgcccccccgcgcccccggccctgcagtcccgaagccccgcgggggtccagaccactgcacctgctgagccagacactccgcggacctgacctccgttttacccatctgtaaaatggagcagctgggcgctggcaagccgtaagtccaagagctttggctccaccagcgtgtacgacgctcatttcctttctctctccccacaccctttccaaaaactgtaagccagaaaacctggccaggcctccgcgacggcgagaaacggtcttgaaggtcggtcggtcgccgtaatgcggtccggatcgtgcacgtgctgtttcgccactgccctccggctcctccttaacaaagatgtcaaccgtgctaaatcacaggtggtgcctttgtaagaccagctattgtcccctcataagtcaagatataaaacgctttgtactgaatggcccatgatctggagcgctcaacttgggagttgagctgttagattttcttttccccacccaccagagccactcttctcccaaatgacctcacttaataagcaaaatttaaatggggtggggggggactcaacatgctgtggatgaaaagaatagttactgatttcttcacacttaatggcatgtaggagtcttttaaaatacagtctcataccaaacagatctgtgaattttaagcagaactgaattgtattaatcagttgatgggtttgttcatcttctatcactagatgagaaatacaaaggttgggaatccacagcgtctaattctactgtacttaagcaatctctccctttagtccagaaaatttcctactagttgcacatgagagaaaaattgaagcaaaaaaaaaaaaatctgttttttgtttatccatcaggtgaatacacacttcagcatcatacagaggaaaccctaggtggtctttagcaagatttcagtggttaagagctacaatttagaaaagatgacaatacatacacagtgtcaatagtatttaaacaaacatcccagacaacagaataatggttattaactatgatgctttgggcttctgactaatttcccatgtctgtctgcagccaaacagctgcaggatttttccccctttaaaaactgtttgtgcatcattttaaaaattgcatttaacagccatattctccagagcagtccctctgtgtggaactgaagtgaatggtttagcaatagcgatgaagccagtaagtagtaagaatgtctttcatgccaaaagaactctaaccactctgctagaaatgggctacatttttactctctgaaatgtagaagctgtctgctactgtatgaccttcagtatggtttacatgtctaaataaatggaattatttaaccctgctcacacttgcactagtgttttcaaaattgattaagttgtgcaactgtactaaagtgtacctttcttggggtttgaaaatattaaagaaatcaagagagggtaagattattttgcaaaattgctttctcactcttccagataaatattacattttaaaaattacttggtgatccaaagattaaaatgaatgcatttctgtacactccaaatatgcaattccaatgattatttagctactgcagctggaaatacatatatttagggatacagatatgtacaattatgaatacttgggtaattacacattgtaactaactattaatgcatggactaaaatcaaattacctccactgttttcattgttatttagtacttaacaagtatccacttggcactaaaagatggtcaaaatatatcaaacaatgtcagccttccaaaaaggtatcaaaatacttatatcctagatagatacacatatgttgtatgtagtgcatgttggtgtttcaaatatctcattatttaatgtcctgatctgatagaaatgttagatttcaaatcactgtttcacctatcccaacagttacacctgaaattttagaggctaaggagaaatgtctgcaacctacctcctcagttgtgaactcctgtacctgaaaggccaaatcctcctcctcccagcaggcaatcatcttatgccctgaagcatgagatctgattacccctatcatcatcttagcttgcatagatacagatgttattaacggctgtagtttatccaacccttttttaaaacgcagctgcagcatttgacttggggacctcctgtgaatcccactggttgactccgtcttgcacaaagcacgtggggtttgggggagggagaagagagagggaggtttgttttgttttggagggttttttttttttttttttgaatcagagttccctaaatagccactcggcatctttgtaagtgatgtgaattctgaaattacttactagaataggacaacagagtactgtgtgaactagatctgttggaaacaaagcatagtagaatgtatgatgcttttcacttcattggcagagatcaaatatgtggtcctgatatactcatccacataataaagaattgtagcttattctgaaatatattggccacattcaaactggagtacctggttttacataacaattgtttctacaagtgttgaaacagtaatctggataaagtaggtcctaaagctgctgtgaagggaagacagggacgtttttaaaatctgaaaggcctagattggcaatccaggcagatcaaattcagcgattaattggtcaatctaatcattgcctttttctcagcatctatgatttgtgtctctaagtattgctcctgtaggtcatatcatcccttctataaaacagagaggacacctcacaggtttcctataccttggaacacagcaaattttaagtactggcagaaagggaatttagaaaaaaaccctgtgaagtaaaggaggctgacgttgcacaaatactgaactatagtttcaagatgcacaaaacactgttcttaattctaattacttcactagtaagtaagtgaaattgctttaattggagcttctagaagcccttctgggaaatgagaggtagctggatgcagtagaatgcagtggaatgagtatttcaaagagcactggactcagcatcaggagatatgggttctggggatgatctctgtctctcagtgagtaagcaaggacaagttgtctctaaggttctcactttcctcatctataaaatgactacattagaggagtgccttgtaacttatgtgctctgtgattccacgctaaatggaagccaagttagactgtgtaattcacaggaaattaggaggctgaagaaagcttggcagccagtatctccctggatgtagtctgtgttctgctttcttgtttctctagtcattcttttgttttcagaaagccaaaaatgacctgcactgcttcccaaggtttggagattcagaggacctgtccctgttcccttcctaccccattgctggggctgagcaaaaatgagcccttcacctcaagcttcagtagctttcattgagtatcatcaggcaggttcactcatacattccacatttacaaagcaccactatgtgccagggtgcaagggactagaaagatgtttctacttgattattcttggagccagagaatgtcaagatgcagcgggactctagaagcctcggagtctcagcctgactttagaactgaatttttgtccaaccaagggtgtgaataaatgcaaagacatgacttgttatttgttaaggttgtggggtgaggggggtggtcacacagagcattgtctccttgttgttagcagcgttcatcttcctacttgtggggagtaacagactacttttggcaatacagtgctcaaaagtgtcaagaaaaaccctgcaactcaggacccactggattctagagaacaagcgtctcttttctggattgttcttgtttatttggggggtaaatttggataagaatcaaacaacttgtagagagatccacagcagaatcaagagcaagcctgcaaacactgtttctttcatttggcacttagcaagcacctactatgtgccagacactgctccatgacccacctcctctctcaccatccactgggcaaacaacagccataggttgaattatgatgtggaagcaaatgcaaatcaacttcctccttcatataaacaaacaaacaaacaaacaaacaaaaacttgtgtcagaatgtttttggatactaaacatcaaaactcagccaagctcagctggtaggttttcccagcgatttccttggtctgagcatctcttaactctgcatatcggtaaggggaatggtattttaaaggagtgactctctagaggttgaatggcctctgtgaggggtcgatcacaggggattggggaaggggtctctttaacaccaattccatcagctctgctagctgatgggaaagcttgtcctttcaccttcggtattttaatttagaagaatgtgtgtgtgtggagggggtgttaatggaaaaaatgtcaccgtttttagagaagctagtgaatggcagggctagcagtcaacctcagatagtctgaaactttgaggggtgctctgtacccctgcctctctcatacaacctagttaataggattctctttaacagggcactagcagaggaatgagctataatacaatacagtcctcagaggactgtagaatcagtagattctcctaacacaaggccagctttccagggcaattctggacagcctatgtcaccgcacactggtttagggctccttgtatatatctccagtgtcctgtgtttcatcccaatctaaaacatttatcatcttttatgtgtctgctccctgctacatggagaaaggagtcatgtcattaatctgctatatccccagggtctggcatatagtgggtgctcagtatttgatgagtgggtagattgatggatgggcagaaataccccttgatccatggtcctctcatgatcttatttcctatctcttggaccaaaatgtaaacatccttcgataaaagaaccttccctgcgttttaggctttggttttggttgagagctccatactcacaagcgcctacagaggaaattaggggctatgtctgaacctgtttagaagggtttcagaacctctgagggtgtggctatccccaccaccttccaaagcaataaacttatccttgtaacttaaggtcttgtctctgttaaaagataattctgagccagatggcatttgccccttatcaatcatttcctttaatggactcacaggaaaaaatctttgaaagttaagaccgaacagggtgagaatccttttacaaataacaatctggaacccagagaggtctagccactcgcctaaggtcacacagcttgttggcacagccctgaatccctatctcgtggtttccagcgtttagcctggctgtgcctccagtggcccctcagggcatctgcaggtgacttcccttcatttgcccaacatttatgcagcacctactatgaatcaggcagcatgctggggcctgtggatagaaagatgaagagccatagtctttgtcctgcaaaggctttcttctctgagctgtacccatggtagccccaagtttctacgccttaaatccgaggtcccccgtggcctgcagcagctttgcctgagtagaaggcagcccgcactaaggctccaggcttatttgggacctggtgggcgacggggcctcagcccctcccgcctaccctggagcttgttgccgccgttaccactgaaccagtcatgccagaaagtcatcacgatgatttcagaactgtattgtgatttatgcaaagcgcgccgataattacagccgggcgcacagaacacaggatgcatatgctgcgggtgtgtgcgcgcagtgttgtgcctttcgccagggctgaatggggtgtgtgtgtattccgtaggcatcttcttgacaccatgcttgatcggggactggtgacaggaaaaagagggaagatacccattttgattttgagacaatttgatgagccttgggagtattttccagaagttttggtgcctacaaatgagccagcctggcaggagcgttcgagagtaggggaagaggtggtttggagcccaggaaagccatcgtccagcccccgcacaggcaaagcaattagtagttctccttctcgaaacagacccctaaatgcttcccctgcagacaggcctgggtctagtcatcaccccccacactgccctcatcttcgccccagataaattagttccacccttgaagttctttgtcctgaaccaaagaaccccataatcgcgtccgcgttatgggggtggtggtggtaggtggctgaagcaagtggatttctggcgtgaaccagaacctgaggattccaaacggagcctggcatcttattgtgtttctcaaatcctgcccgaaattcctcccctctctgggcgccgagttcgagaaagcgctacgccgccggtcgggctagctccacaagcggctgtacaagttggctgtcaaaaaacgctgatttctcctcctgtcacctaataaacccctacgcgcttatggcctcgtcccacaatcccccaatctcgtcccaattcgaaaaaccgaggaggagggaataaactgagagataaagatccccccatcttgctctttccccgggaccccagccttggtcgcggcgccccactaaggaggacacaggctctggtgtgtgtggtgtgcgagaccccgagctcgaggccgagccaaggctgggcagaaagttgcaatcacgtgctgtcggagcccactggagcgcacagcccgctccccctgggacgcccaggcggaggacctgctgcgccctcccagggctcgggggactccagcattcacttgcacgcacaggcgaactctgattgaaagcccgggatgacaccgagtctggagaaagagggaccggggggtgggctggcggaattgcagagcgccggccacagctcccctccccgcgaacgtcgagcggagggcgggaggtgtaacctctgacctctggccgggtccacgccctgaggagggactggcaagctcttgttcgacaagttcaagctgccgagagagcttaaatagaattaatctcttagagatcggggatcatcgctccctcggcatgcgctctcccagcgccgcgcacagagcaaggcgcgagagagctcaggaatcgcgggaaggcaagcggaatggggagggggtaggggatgagggcctctcttcactattcctccgcccggagagcgggagcccgcaacgcccgccgaggacgagcggcgggagggaacgctctgccctccagccgccccggtgcagataatggaggcgacaagagattcgctcagcgtcggatgggccagctctgcttggggaagctggcggcatcctcccctcggctggtgcccaaacccactgcgcgaaggccgaaggaacgcggaacctccagaagaccccatcctcagccctgactttccgtagatatgtgcaaaatgagtaaattactcacctcgggccagatccaagttttacccaacagaaggggcaccggaccaagaatgaaccaactcacatggccatgtccggcgcgcacaatcacacgccagcacacagccacccaatttcttccgcgaatctatctggcactctggagagagggggaaaagcgttttgagaaagccccgtcacccctccccttccttcttgccgtgaaatatacgaattcatttttattacgagccgcaccgtcctcaccatcacgcacgcacagagccacactcccatattcacactttctaactcgtaagctccgacagcgcctgcattttctttgggagccgcttggaggttcattaatatcattagcatttaaccccctccctcttcccatcccctccccgcacatggctgacgtcagaccccgccaggagttgggggaaaagctaagtgggccagggacgccctattcccctccccgcggctgcctgtcagagcgcttctggagatattacaggggacccagcccgcagcgacaggcacaaagtcacggggtaatgaacttcggggacccttcgccgctgcgtgcgcggctctccccggaaacccggacctggccgcctcttccctcggaagatttcccagcaatctagttttcccactctgcgcttgggttccggcagcgcggagcccgtctgcctctgagactgcggtagtgttttccttctttccttgggagaccagcggtcggcagagattgcccacactctgcatgcctatgtagagggagagatcgaagactgagtgacaggaatggggaaaaagagggatttcgctccgtaggaaggccattttcgtgtctccatctctgtctttcaacatccctctcttgctgttcttccttcttcctcagtcttcctgtccatctctccatctgtctgtccatgtgtgtgtccatatcaagcagcattcccagcagctgcggttttgcaagagccgggaagaaacttaaggatgcttaaatttccactgttggacgaattctgagcgcccagggagcagcgcagcgcgcgactgacacccacctgtcccgcccaggagccttgcaggctggagggcagctggagagcggcggcgcccggcggcgaggcgggcgctgccggccgggactcgggcagcgcccaccaaccgctccgccccgggacagccagcatgagcaagccagccggatcaacaagtgggtacctctcgggccgccgtggggcctaggcgcgcagcctggggcgagcgagcggggaggctgggggaggtcctgcctggagcgctgcgaatctgagcccctgagagggattccagcgggcgtgtgcgttcggcccagacctgtagaccgtgagttggagcatttcgtggagaggggagagccgtttcgttgcctctggattgcttgatcccccctgtctggtgcggtgagaaggttacgacccgcgcagcccaccagtcggatgagttgtctccatttagccgccaggtgctggatgggggggccatgggggcgggaactgggccgcagctccaggcggtagcacaataacacactcgctcaaaactccgagctccagcgcgcaaaagcaactctgtgcaaagcggattttgaatggaatgctttgcaccccgtttctagctatttcaaataatcctgcaaactgggaagcagaaacaatttaaaagtcacattttccttaatcctaaatccgcgtaggtcataactggggaatttaaagtatggcgaaccactctagcaaagagaggaccaaatccctaatcccaaggacttttcgagccggagcccagcagaggcaggagtgcgcggcctgctccctccgtgcgcttctctccttcctcgaacttccttagctgccggctctccgaacgccaggccgcagctgacctctcaccaccccgagactcacgagcgcagggctaagtgtgtgtgcgagggcatttgcttgcaccctgcctgcggaacccaagaatgtgcaggcccgagccagcgttgagcaggcgcggtcacggtgctcagatctcccgggggcatttcagttcccgccatccagtggcccacggctgcgggctccagggtctgaggctggggactaccgttgccgccgcagtccccatatcccgaagttgccttgctgcttgtgttgttttcgcagatagcatttttggcgctctgtgcgttccttccctccccctccccctttcactcgccctcattgtcctgagtctttgaaagttgggagaatcggagatacttctgaggactggtaatgaagtctcacttaagtgggatgcaattcccgccctcctacccccctccaagaaggaggttgtgttttcattttgttttgctttgggtgctgacctttaaaaaattagagcaaaatgaacgtgaacaaaaagaaaaggagaaatgtttcgagctggggcagagggagcagagaaggagccctcaccgcggccggaatgcagagcggaccctggcccaggactgggtttccctttaggctcgggcctaccctggccctcgctgttggaatctccaggaggtaaagcgacctcgatttttgttgcccgcattcccgggcgtgagtgtccttcccaggaggctcaggaggccgtttctgttgcattctgagcctccgttgcaaaaactgaagcccgtgggtctcggcaggcctcctagctcgctcgccccgggacaggccctcgcctacacccctggaagtaaggagccccgggctctttcgtccttttcggggtgtggagcccctggggcccttgaaaggtgaggcctcagaggcgagggaggggtgagcggggagctctgcccgcctgcggctgcgcccccgctgtggactaggaggcaggccaaccctccggactttgggggaaaaaccacagcgggctccttgcggaaactttggccgttctaacttgccaagagcctgagtgaggccttggaagcctccagccccggctcaggtcgggacgcggctgctgagctttctcaggcccgcaggacagcggcccccgccggtggcgccgctgcatttaggccctttccagaccggtggcggcagccaacccgagacttgcgtccctcgggcccggggcagctaggaggtcggcgcgcagcgggccgggtcaggactgggtcgagcagacagagctgcagcccccgccttgcccggcttctcgcggctggagagcagagcgatgtcacccggagccccgcctgggtggtaacgagaccctggccagtcacccctgcagcccagactaacttctttcaacagcctctgatggtaattacagtaatcgaagctgccatatatctttaggcaattatgacacacaaaaagccccgaggggaccccctggcgagggaagttaagaacggttttccagcttcaggaaactccggctcgcctcacgtcggagctcgctcggcttgctaaatgagaggagctttgcaacggggtcaaccagcttgtctcgtgaccccaagtcaccttaacgtggctgggtggcggagtctgaggcacaggcccgctatgccccggaattttcgcgtccctccctcctgggccccgccccagcccggttgcctgtttctaatctgccccgggagccgcggctcagaggtctgctcagaggcaggactcgcactggtggtggcctagagggcaacagtccggaagctcgggcgggggaatccgaggaggggcccccaccctgcactggtcttccctccaccctcatcgggttctccagagatgttgtcatgggcctcctgtccggatgggaagtggggaaaaagagaccccaccactgctcctcccactcactcatcttggcatcttcaacagtgccacagggaagaggacagctggggtgacagtactgctgggccccaaacgtggaccctggagcggtcagagggcgcgtgttaagcagaggatggttgtaagatatggaaaccaagtttaccgcttccagagtgagtgcagtgcagcggagctccagacccggttcctgagcgaccaggaactcccttgggcgcagtgacaggcccgaaggagtggaggacaagacccgctgtgcccttgcctggccctctccagcccctccctcccacagcacaatctcccctcccgccctgtgggaggggggcgccgagccggtggccgccgcgccgcgcgcctcccctgcccgcctttgtcgccgtccgaattcccatgctactctttttgacgggtcactggtggctctataggcaggtgctgccgcggggttgtaattacccggccgagcctggtcgttaccgaacaccccctcacccccaagcacggtcccccgcgctctccttcccccaccccctccacctgagacgagtctgggacccacggtgcaagctcgcccggacgcctcgggttccaggagcaagtttacacctgcggtgcctcgaggccctccccgcgccacgccctcacctcccctactcccctcgcccagacgttccactgccgccccttcccacctcaatcccatcgtagtccccaacccaagcgctttcggcagcagctgtcgaatttcagggaggcctgaggccgctggggcccaaactggaggccttcggataggtagaagaagagaaaagcaagtgttaataagtcaattgttatcaactattgttatttttaaaattaaagtgttaattaagttaacagtttaatactccctttgttttgcgggaggaagcatttctaagtccctataaaccgcttcaggcacttgttggactcttgaaccttagaggaaaagaatccctccctttctaaacggccaaatattaccctctccctgacactcctccagggtcggtggccaccccaggcttgaggggattccagggaaagttctcttgaggtggggtccatggggggtggggggatacagcctagagaaatcagtcagattcttaatttaaaaaaaaatcaggctcaaagagcactggaaaaaaccgggaggaagagatccacacaggaccaagtgtgtggaggccagtcttctagggagaaagggcttaggaaatggagggagcctgtcccaagctaacccgacagggaaccgacaacttgcgtcgctcccctctcccttgcctagtcccgaaccactttgcggagaaaataattttttcctaaaagaaataatttctctaaagcgactcaccaagcattttttaaataggtaaagcgaaagttggccaattaccactacccttattatcattaataatccaagtattagcattacaataataatcctaataataacaccgcccggcggagctcagagaaaactcgattgccttccagctgccatccctggttccagccgtgtttgtttttcttcttttcccttttacatttcaagtttgtctcctcgcgcgctcactaacaactttctctgttaaatgcaaaagcgaaggagggaggcggccaaactttccgcggagcagaaaggcagtggagggccgcactgccgcccgggcctgctgtcatcttttattccaaaatgggtctcggcgattagaagagaaccaaatacatgtagcggtgcatgaataatgctcattgtaggaaactgacacttgctcaaggaaaaaaagtttgggtataaaatcacttcattatttgcttttaccgcagcttcggtgctaatcccttcagaggtcagattgcttagcatctctctctccctctccccttttctccctcttctccgccctcctttccctctcgccccttccccccttccccgtctttcctgcgatttcaggccgcattttagatatcccctgcaaagtgtgtggcgaccgcagctcggggaagcactacggggtctacgcctgcgacggctgctcaggttttttcaaacggagcatccgaaggaataggacctatgtctgcaaatctggaaaccaggtaccttagccagggctgcactgctgggctccgctctgctgcctcctcactcttttgtttgtgccaaggcctcctctgagtttccacgcagttgaggagagacccggccctgacctctcccttcctctcccctccttcttgcctcaactcttggaggccctttggctggggaaaggcgggaagaggtaagggaagatatgagtttacaggagggagtctgaagtcctagagcctccctacacttttttaaattattattattctgaaagattttgacactgggtaaggcccacaccctgtggctctaaagccggcccaagggacctaaagaatttagcatctaaaccacaagtagcaagcaggagaaagagctttgttattgtgcctgcccaccccacactcactcctagcagcatcaagctcagtcccctgatcacttgcctgggatgcagaagtaagcggcacacagacatctgagtcaaggtcaccaccacctttagctgagaccaccaagtgagtgctagccacttggaagagaggccgtgctttctgaagggttgtgcattttcaactctggagaagcagggctgctctggaagtgggcagtgggaatccagcacccatgtgaccttagctatgccttgtcagaaaagggcagggtgaggaagaagagaagattcaaaaggaaggtgcaactgggaccctcctcaagcttccatatccctgtcctccttctctgcttagaatttgggcccagtcggttgttttggtcttgagtaggcagaactgtctcaaagagacagaggaatctggcatgggctgaatatgagccaaagcttctagaaagagtgagcagaacctcttgactcagtttccagctcaataataggctgattttaactaaggagatcaaccttctggtcctacactttgccctctccttatcagcgactcagaccctcagtacagagtcctccatttcacttgtggaaagatccctgagggtgcattagtcagcagtcatcctttggtaacaaaatagtaaaacacttttcactaattgatatatatagggtacatgtatacacatgcatatattgtctgctgctagtgaattgttctgacatctttttctgaagtcatgtctgctcatattgttttctaatagttttggattaaccacaaaaacagaagatatttgcattgagataaattttgagctctctagccctgttacctgtttaattggctactgtatcagtttctagcttcaccatatggacacatcacattttacacgcataggactgtatcccaataactccacaggattgtgcgattactgcgggttgtcagatttgaaccaacttctacttagattgtcttttgcttttatgcagtgaacagaattggaaaatcaagatctctgatgttgtgcttgatcttttagaaggggatggctatcaattcaagcatattgatatcagtccaagtgcttgtaaaggactgataatagactcatcaggcctggtgttcttcttgcaaggagagtaaatgatcagagctgaggcgtttatccttctctctggcgctagatatttatatacatttgatctgatttgaagacacacttaagaacttatgaaggtttccattttgcatttgcatacttataagaatactggaaagataccatctgaggatagatatataattacatttaataacaagttttaaaaaacctgtttacaatgaactattacattggccagcaaagatgccctaaataattcactttggacccaaaaattatctcctttctctcttattctaggattaaattatattccaatttattattaacagtaatgaggacatttagaaatggatatgaacatctgtcccacctttattttaaataaatcatcataatttaaattggagaagtgtgaactcataaaactgcattcgaatgtgtaattttcccctaaagggcttcagggggaagaaaaacatacttactccaactccagagtatatgaatttttgagattatgaagcaaaataaaaatacatttattatctttcttctcactacaaatctaacagtagcaacttctataaatataggagagcacacaatgtcttaaatattttctgtgtataaaactcatgcacatgactctttatgtatctatgcatatgtcccctcggtaatgacatctaacactgaataaattccaaaggaaactttatctgtagatttcctctttcaatggctaatgtttttacagaaaattgcattaggtaaacatctaatttctcatgcatctcagataaatatttctaaagaagtgactacctttattttttcagttactatgctaacagtctgagcccatattatcatttagtctgacagtccatcacattaccttcctggtcctgtttacatggtgagcatttctatattttgctcaagacttgagctcttcctttttcaccctcatcttctctaggccttgccctcctaaactctcaccttccaggaagggctgtgtttctatgcacctgggccgaggctagtctttaaggcaactctcaacttgctgataataaggttggcttcatacaaaagcaaaagtgaggtaataggagagtgaagaataaatgggagagatttatctgatagataaacgggctctcccagaaagtggcagaaagaggtagactcaagtactgaaagcagaaagaatcgttggtgggagggcggtatggtgtgaatcctgacccaaaagccagctcttaacggaaggaacttagtggcctctttctctggggccaagtcgctgtcttcggtcctgaagtctcgtccctgttccaccactccgcgactggcggaagttcccctagcgagagccccgcaggcctgcggggtctgccaaacccggctctctaagcttcacctgcttggagaaggacgtttcccccttgtccgctttcttggggtccgggactggccctcttgaagtagcctgggacgtcccagccccttctcgatctggccctgctcatgcccaaggccctcgcgttttgcaggcccaggctcggggctccagggcctgcggccgggcaaggtcgcgcctccacaccgtttccccgcccgggtgccggctccgggtctccagcctaaaggccctggggaccgctgacctcctgctctctgttccagggaggctgtccggtggacaagacgcacagaaaccagtgcagggcgtgtcggctgaagaagtgtttggaagtcaacatgaacaaagacggtaatcagtgcatccctttattccaatgttgattgagtagtaagtaaattatatgtacagaaaatacatggcactcctatgcatgtaaatcaaccccggagcgcttctttccagatgctgggaattggcctcgggctttcagtcgtatccttcccgtctttcagcaggagccgctggcgacccctagaattccccagggcaagacccatgcccacatcaggaacttgcgccccacagtcatctccacacaggcagcgcttggggggaccccactctccaggggaccggcgcgcattttctgcctccggtcctaatccctctttgcagcccttcgtggccacccttaagcctgctagcctgccccaggatcttaaaatctggatagtctcacggggaggagatcatacaggctggaagttcgcggtgtgttgaaaaagggagggcagagacgcgaaaacgcggaatttccagcccgtgtgcaaattctccaagatgccaaaatcagtacggccattgggccgatgtgagtccagggccttctctctgttctacagaaaagagggaaagggggctggagaggcagggtaacgcccgtgggtgcctcggacacccagctctcccaaggctcttaagcgcgcaacagcaagaaccaggacgtcagagtgcttcctgggcctggagcacggtccgagctgcgtcccccgctgcagcctgtcgagggcgccccaggcccaggcagggggcgagggtaatgggctggaggacaccgtggggcctgggaacagggtgcgagtgggttttgctgtgaggcggcccgggccgggtggcagctccaggaggagagagagccccttcctctgcggcgcaggaagccggagggagcgtccaacctgttgaacttgtgtattgacaagttgtcaagctcggcaggccgaagattgccctgaattaatttgtttgtttaaactgttggtggtaattgtcacatctcccctgcctttctccagcatactcggagacgggttctccctcgttccattccctagcaatcccggggctcgggtcctttcctcctgcggccctcggaggccaaaagctatttctgtgggggcggggcctgcgggtagggaggcttgttcttggacggagctggaaaagtctgcgcagaaacgaggtgtctggcgtgcgcgacgctccctctcttttggatgggggcgaggatacctggctactccagcccagagggtctctggtttccctgcgaacccccttccctggtggggaggagccctggaccgaaggagaacacacctggtcttacttgaggctctgccattatcgtggcactttgagcacgggcccctcttctaagcctcagcttccgaatctattcagtgtagtggttagacgatctcagaatcccttcctccctcagattccctctcccttcttcttttcacctcttgggcgattttgcccgcccagacttgacattggggcggggctggggggagagccgcagcggctgtgtctcgacgtctctaatcgccggcatgcgtttctctgtttgcctctgcagccgtgcagcacgagcgggggcctcggacgtccaccatccgcaagcaagtggccctctacttccgtggacacaaggaggagaacggggccgccgcgcactttccctcggcggcgctccctgcgccggccttcttcaccgcggtcacgcagctggagccgcacggcctggagctggccgcggtgtccaccactccagagcggcagaccctcgtgagcctggctcagcccacgcccaaggtcagcggccttgctgggcccaaagagactcgtgccagcgaatggagagggacgcacccagttcttctgagctgtgtgattggggtcaggcaaactggggagagaactccagggtgcttggcgggtctctgcatggagctccagcccttctgctctcccttgttcagccaggggtgctcaaacttgagtgtacagtagagtcaacctccgagtggctacaagtgtgcactccggatcttatccccccagaaatttcatttcagcaagtttggggtggaggccaggaacctgcacctttaggaaacacccactggtaatgggtggtgggtggagacctcgtctaaacccagagggcagcctcaggtgttcctaaagaccagaagaaccaacgttcatttttagaggagaggaattggctacagctggaggaagggctccagaattccaaatcttggcatgtatgatcttgggcaaagccatgagtttctaacgcaagtgcgaaatgtggagatcacactgttagaacagtttgaggaatctgagttcatttcccatgctcccctcacctacttctgaggcaggtggatttacagcagggttgattccataggagcagggccacagcctgaaccacctggaaaggctgccacctaaggcctaccctccaggcctacagctgatacctactaacacccccactccaggctgatgagggcctaggatctccctcagaggagggccagctgcagccccacactgcagggaagccagacacctgggcacatgcacacgcacaatatttaatatggctttcttacccttgatgtgtataataagctctggaaagtagtgttatgaatatgttgtcagttatgaatgggaatgctctgtgaatgattaagatgtctaattgaaatatttccataatatactaatcctttctaaaaatactcatatgcatatttgtgtttgggatgcctattaatttatactttttcacatctatttttatttacacaaatgcaagcagctcttgtctaaattgggagccaggcttggcacttggctcagcccaaggaaaatttgctgcaggggatagaaaagccagagggccttctggaagggagaggctcccaaagagtggaaatggacctcccccaaccagtattacttttcaaactctatagacagcgatgtttgatttttttacccaccaatgtcaactgcatgtttaaacaaaacatccaaattcttttttatccccttccttgctttaattagaaattaaaagtttggttcttcttgcaaagctgtggtttcctcacttccaggtgtctttctttcttccctacccagtacccccatgaagtgaatgggaccccaatgtatctctatgaagtggccacggagtcggtgtgtgaatcagctgccagacttctcttcatgagcatcaagtgggctaagagtgtgccagccttctccacgctgtctttgcaagaccaggtatgaccacactgaggccttgggagaaagagagctgggaaagaagcagtagcactcagccttataaaacttcctctatccctgggtaaaccacccaaggcaggcatccattcttaatagcagtgaggaaactacttgtttttacttgcttcttcctgtgggttcaaaatatctacctatatgatccttagtaagaaacgtaattacattatttcagaaaggatgggtccagtctgtgaaaacacacatacaagaacattacctctttttgtttgattggaacagcaaatataatctcaaattttaaaattgtaatgattttctaaaactgttgatgaaacaatgttttactaagaacattggaactgagagaagtagaaggtggtaagagtatgccctcatgagatttttcagaactgatgttattattttatattcccagctttatattctccattgcgatgctcccagttttggtcattaattgataagcatgtaaaaccaaagggcacagtgcacacctcctgtaggctaggttcttccttgattcttcatgtacttttagacattttgtaaacaaataggcattttgcttaattccgtggttgtaaatgacattcaggggaagaaaaagtgtgtgcagtgaaacattgtattgtactgagacccagaaattttgttgataggaatattagaaatgctaacatttttctaaccttaaaggaaagaaagaaaataaagtgttcccaaccattggctgttaccagtgcattcacaggaattaatgacaaattttccaaaggctaataagtagttctaaaagcaaaggatttatttcttcaattcatttcatacctaattaaagcataatagtgcccctttatatgaagtatgtttcctacggaaagatcgggcaatgtgctaaaagcatttcattttctagcatgagatgttcttgttttcatggcctgccctttcaaatatggccagaattaaatattgtttaccttgcattttataattatttcctgtacttgatggaataaaactaaaaataaaacattaaaaaaattaaaccctttggtctaattgtgattttggttacaagccttcatgattcagctcttagctcccaaaagaaatccttttacataaatcatttagagttgactggcttttgagttttgagatttttaaaggtagttaggtcctatctttgaccaggtttactggttagctctaaccacttcctgtgtgtgtgtgtgtgtgtgtgtgtgtgtgtgtgtgtgtgtagactggctattttttttcaaaataagtatttgtatactctcacccaaacaaaatttacttactgtctgccacttagccctttggtagaaatccttcgacaacaagcaacctgcagtgaagtggaatctggtatattaatttggaaaaagagacagattttcattttaaatattcagtagcacattttattagaataaaaatgacaagcaccttgatgctgtccatttatgggtctcagaaaaatcaagcagtgagacgaggaaaactcagcaaaacccgattaacataattacaccctgatttcccccagtgcctcttgggaattagtgatctctgtctctctcccagcccagccccctcaaccctccaggaagatggggacccagctctgcaagcgtctgaggaatcctcaaccctgctaatagcagcattctctgtgaggggaatccacctgctgagctgctggcatttcataaagcctcgctctctagaggagcttctaggtggtcaggaatgggtggatacaaggacaagaggggcaaatccttttctgagagaaggaaactttggagaattggaatggctgactctcaaatccatatgcatatctataggcaccttttcaaaaggaaaatatgggaaaataagggaaagctagaatattcagaaaaaattaccaagacaggcatttaaaacactttttaaaataatggaaatttacatagtgaaattgtttataaatttataaattacacactatattatattatacatctattgtatgacagctgatgcttttggaagatgcttggagagaactgtttgttctaggaatagcacaatgggccattccggttgatgctaacactctactggctgtatctggtaagaattgcacaatttaatgactttgttgtagaaattaccataaaaatacattactgaaaaaagaacaacatgtaaagaataacaaattcctgctgaacaatagagtatacctgtcatttataaatctatatttaaatgcaaataatgttgttttgttgtattcatgactgcttgcattgttatttaaatgcaaattactgtgtttgttatcatccaagagaagattttatattaactttcatacaatatagccggtttacatggaatcagatatcttagagtgacaattgaatagatattgatatgcaggattttgtcaaaaatcaatattaaatcatgaaaatgccttcatattagagtatttatcccatatttttattctaggcatgaacggtgacaacacagattcccagaagctgaacaagatcatatctgaaatacaggctttacaagaggtggtggctcgatttagacaactccggttagatgctactgaatttgcctgtctaaaatgcatcgtcactttcaaagccggtaagcagacacagacccctgtttcttctccttccccagttttgccacctcactaattcagccacctcgaagtctgaactgacctttgcaaaaagaggtgatggttttcaagggagctgatactcttaatctggccccattttttattgctatgggaacctgcatgttctgctgggcatcaacttccagagaggtgcattcccagacccaatttctttttttctttctttttttttattttttaaatttttgtggagatggtgtcttgctcttgtcacccaggctggagtccaatggcaccatctcagctcactgcaacctctgcctcctgggtttaagcaattctcctgcctcagcctcccaagtagctgggattacagacacatgccaccatgcctggctaatttttgtatttttagtagaaacagggtttcaccatgttggccaggttggtctcgaactgctgacctcaagtgatccgcctgcctcggcctcccaaagtgctgggattacaggcgtgagcactgcgctcggctcccagatgcaatttctatgctgtctatcacagtttcctggtcttcatttctagttcctacacatagtggttctgaactgagaagtttccggaatgctgccgccattgcagcccttcaagatgaggctcagctaacgctcaacagctacatccataccaggtgacccttgtttgccttgaacatgtacttaagaaaattgcctccattgtgaatgcctgagcaggcggtaataagccagttcaaacattgtgactaattatcttgttgccagccagttaatttagggagaatccatgtccttacctatctctcagggtgggtgagaggagcaaatctaattagatgatcaaagtgaaagcactgccagacatattacagttgtcctggcggaacaaattgatccatcaaaataatggaacaacatttgtgtgaatgggtatggaggggtcaaaaatgaagcctaggctgggcacagtggctcacgcctgtaatcccagcactttgggaggccgaggtgggtggatcacgaggtcagaagatcgagaccatcctggctaacacagtgaaaccccgtctctactaaataatacaaaaaaattagctgggtgtggtggtgggcacctgtagtcccagcagctactcggaaggctgaggcaggagaatgtcgtgaacctgggaggtggaacttgcagtgagccgatattgtgccactgcactccagcctgggcgacagagcgagactccgtctcaaaaaaaaaaaaaaaaaaaaagaagctcaaagtgtaatggttggtatgtgagagagtggccacatcatccttgagaaaacacaggtgactttcttcagatgccaatctcaaataaaaggatgagagaactttccagagaggctatctttttttttgagacagggtcttgctctgttgcccaggctggaaggctgaagtgcagtggcatgtgagcatggctcactgcagccttgaactcatgggctcatgtgatcctcccacctcagcctattgagtagctgagactataggtgcatgccaccacacccagctaatttttttttttttttttttttgagacagagtttcactctttcacccaggctggagtgtagcggtgcaatctcggctcactgcaaccttcgccttccgggttcaagtgattctcctgcctcagcctcccaagtagctgggattacaggtgcctgccaccacgcccagctaatttttgtattttcagtagagacggggtttcaccgtgttggccaggcaggtctcgaactcctgaacttgtgatctgcctgccttgacctcccaaagtgctgggattacaggtgtgagccaccatgcccggcacacccagctaatttttaaactttttatagagacaaggtcttgctatgttgcccaggctggtctcgaactcctggcctcaagtgatcctcccacctaagtctcccaaagtgctgggattacaggcctgggccactgtgcccagcctaaagaagccatcttttcacctatcataactgttgtttggccttggtgactggtatctgttattttgtgtcataacatctaccaggttacttctggccatgcagggcccacaggcagaggctgtttttggctgtttgtaggaactctcagagactggggctccaacaaagctcctcctggcccagcactgggcaagcccattaagaagtatagactgggggctgaggtggctccacacctgtaatcccagcattttgggaggccaaggcaggcagttcacttgagctcaagagttcgagaccagcctgggcacaacatggcaagaccccatctccaccaaaaatttaaaaaaaaaaaaaagaagaagtgtaaattttattatgccatttaaaaaaaaagccaggcttttaaagagaaatggaaactttctagtttcctgagttaggactggtagatttgaagttagaatagagttactcttctctaggctgatttgaaaggaatctgtgaaagctcagctccataatctcaacatcagctatagacactgtggggggaataaatacatcaaatgggtagaggctgttaatgcctccctcaactaatgggtcagagaaatcccaagtcaactctgtccatttggggtgataccacttctgctagagtctctctatttctatcgtaaacctcttttgaatactaaatgaataaaactgttccctgtctatggaatatcactgaaactatgttgacagatagtgcacctgtatatgttttttcaaattaaaatgccaggatttgaattttaaatgcatattgaattacagaatatatatagtaggcagttaatatttgttcaaatttattaaatggagcagtacataatctgggtacttctactgacttgtaggccgggcacagtggctcacacctgtaatcccaagcactttgggagttcaaggagggcggattacctgaggtcaggagttcaacaccagcctggccaacatggtgaaacccgtctctaccaaaaatagaaaagttagctgggcgtcatgacgtgcacctgtagtcccagctactcaggaggctgaggcaggagaactgcttgaagctgggaagtggaggttgcagtgagccgagattgtgccactgcactccagccccaggtaacagagtgagtgagactccgtctaaaaaacaaacaaaaaaattaaaaagacaaaaaaacaaaaacaaactaacttgtatgtcctaactgacctttgacatttagagccattatggtattaagaacttaaaaatgagaaggacgtggtatccagttattgatccagtcaagcctttgccgagtactggccacatgcagggctgcaggtgggcgatatgggataccagaaggagcaagacactgccccttatcattgcaagaagtgggcagcagtgtcactccaatccaaactagagaagagaggaaagcaatgtggggagtgtgacagatgaatcctagtcagagggagtgagggacaatcagaaaagctcaaagtctgatgggtggaggaaagaacatgtgaattggtccttcaatgggaggaggatttcagcaggggagaagatgtgtcctgagagtggtggaggagctggtaggggtcctgtgggaagtgccagagaggtgagtgaggaggggagcctggtgtgccaggagctgctgatagggtggcccgagagaattcaaccatgggttaacaacagcctattttagagaaatggcaagtaaagtacatctccccaacaccgcaaaagaagaaaattatgtgtggaaaaaacacatctgctttgccatggaattcttattatttctattaaatattagaatagtaaatatcaaataagtatcttatttcttattaaataatggaattatggaatttcttatttcatggaattcttatttcattctgatatcagctacagctgtaatttaatatttatatctagggtcatacatgtgacaaaaatgactatgccttatttcttagcccttcaaatcagtgaacactttttcctccagcactttcctgtctagaaaaataaaacctgaacttgaaatgaaaacttaacatgcaaactgaaactgagcctaattgtatattacagctctctaagctatttctctaattatcgaggacgtaaggagaaggctaggaattgacattccacacaaactatattctataactgaagatcaaatatgcaaatctgtaatagacctaaaacacttaaacctaaaagaaaatccaattattgatgctaatggatgaagacaagggcatagatattctaaaaaataattttgattagtcagaccttctctctctaacacacacacacacacacgcacacacacatacacacacacacacacacacacattgtttttgttttggatgcccaggctgcattgcagtggtgcaatcatggctcactgcaacctctgcctctgaggctcaagcaattctcccacctctgccttctgagtatctgggactacaggtgcccagcgaatttttgtagagatgagcccttgctatgttgcccaggctcatcttgaactcctgggctcaagcgatgctcttgcctcagcctcccaaagtgctgggattacaggtatgagccaccacacctgacctcatacattgctattgtttctggtagtagtacagtatgctatatgtaatagacaattaatttttgttgactgactaaccaaccctttcccaactaaagaataaaataagtgggagagtagatgagtgggtaatctaatcgcagaaaatcaggagttggttgtctatagattcccccaaattcatcctttctgaaggtgattatttctcacagtggtttctcaccacgggaaatgttcagcatgttgggtggatgctgcagatggcagaggtcgtccaggcagccactgcctccgacttgctgaagaattatctctactatgcctggtcctgggaagggaaatagagctgttgaaaagaagtggccaaggtgaaagggagacacggatttggggattactttccaagaaacattagaaatacattaaacaaggagaacaagtggtaggatttaagtatttttttttaatgcaggtaagcttcaccatttccacaccacactactagatgtggtctggtggcccctatctgcaggtggtcatgaagctgggcagtgaaagagccagctgaggtcctgagaggcccagatgaactataagccttgtattctgtggaagtgaaggactcttatgtgcccagagctaaatatttagacaagcatgaaagttgctcccctgaactttatttgcagggtggagttatcaggcagttaaacacagccacctgactccttcgaaggaattttgatatcccttagcttctagcaccttgtggcctgggttgaacccagcttagtcacagatgtgtatcccggaagttcaggttttaggtgtttcatttcagtggagggagctctccttatgtatattgatatctaattctaactattggctgaagaagtatcagggctgcagtgaggaggtggcttgcaggcatctaaaggcagcagaagattgaacttgcacatctgagcacagatatatgttggacatcaaaagaggaaattgttaagcaatttctcacatctttaattacatgccaatttcattgacatgagagttgggtggcactgccacccaacagaacttagtctttaatttgcagtgtaataaggatggaattattcctgagagagactaagtataatgcctgaataataatttggagaattgcttagaaaaagaagccattttatttgagggaaatagccttgaggagtccttagaattagaaaacatgggttctgttgctagccttatcctcaatgccctggtcgttttctataatggaaaccttaaatttattatttggcttaaaattagtattatgcttcttaaatttctttttttttcccaaacaaaatgcaatccatttgttaatgtagagagggtgtccgtgtgattttggcagcatcatttatggtctccctgcctcaagtagtctacctgcaaaacggggacaacagtgcctgtccagaactttgctgcagggatactgtgttattcaagagacctagatcagcaatgctggagatgatgtgtgttcaagtgtaagacgttagtttccataagtaatggcctctgaccttgttttcatggcttctcacattccagatatcccactcaaccctgtcgctttggaaaactcctgttgcttttgccagctttacgttctattagcccatcaactatagaagaagtgtttttcaaaaaaaccatcggcaatgtgccaattacaagactgctttcagatatgtacaaatccagtgatatctaagctcacaagatacccacttttcaggatgggacagtatcagatgaacttcaacccatggagaacaagcctcaactaacaaacccttcaggaagcatataccggggaatgtgtagccttcaggaaaaaaatgccaattgacacaaagcattccagtagctatgacctgccgccctgaccaggatagggcgggtgggaaggagaggggtgcaacaggaccgcctgcactgaaaactcactgctgccatgccctgggagggggcaaactgggggttgccacaggccgtgccattctgcctcttacctggaagatcaggctgaacgatcaaaagctgaaacataagtagtgctttctcttcctttttagcatacaaagtttggtaaccaaatatagctctgtgtataacatcgtactgcggccttcaaaactacgttatgttggagcatttattttaaaaataatggtaggttttaaattaaaagtgttatcaaaagtttcccctctattgtaatacattattaagtggccttcagaactgagttaataagtgaaaagtagcttatgccatgtgatttgctttttctctatcttcttttttcttttctttctctttcttttgttctttcttcttcttttttaataccataggccaggcaaccttgtcaaaggaattgatggacaaaatgagattctcaccaggacttcaggttggataacatgtcaaaaagagaagagctttactaaaagaacataagtcaagggaggatgaataaaaacagcaaaaccaaataaagtggagatgagtgattgagtgaggtagattgctgtcccgttaacatagtgctgaaaccaaaggcagtgggggtccaaactcgtggtgcagcaagtcacaccagacaggaaacgaatatggacgtaattgcagaaggaacttcaaggagatgaatgaatgctaaaagggttcttgactgatccattgctaacagcctgagactcttcaatgcctttccgaaaactggtttctagtaaagccttgaatgaacacacacacacacacacacacacacacacacacacacacacacacacaccgtcctacactttaagctgctcctttggtatgactctatacttatggaaatgtagaaacaaacatttttaaatagctgctgtacttttcacattttgatttattaggtactagcactgaggaaaaaaaattcagcacttggactatcataggatgagtaaaacttttcttgtacaaagtgaattaactgatttgtgaagttaaaaggttgtactcattgtatttacaaagaataaaaatatattgaatttaaatgaactctttctgatttcttaccctccctccctggctggttctcacccaccagaaacaaggtaggggcagcagctggtgttaaaactgaagctcggagcactccagcacagagcctgcagaactgaactacaaaggcaatttccttcttacagtgaataccatttggaaaatgatgaataaagaaataaaacgtaagattctgttctctacagctctcaaatgtaattgcatctgttagaaaaattgctgtgtgaggaggaaggaggccgattaacagagtcttcattccttcctctgtttctaactctcttgccaacatttcaatcctgaccagtcacttgaaatcatttaatgatcaaaaagataaagtatgataaagttcatatggtgagtaagatgtggagggagcagtagaaatgtcatccagatgttcccagcaagtcttaaggcaccggtcccacaagcaaaggccatcagaggtgcccaaggccacaggcactgtagactccttttgggtggcagctccagcaagagatgcttgtgcctctgctcttgctaaaatggtcttgcggaccgtatatgtgaaatttcaatcagctgtgcacttcttgtctacttattctacggagaatgagaattggtcttaaagaaaagcacagtactcaaagactgtgtaagaatgtcccttgcaacactgttcgtatttaacaactttagtatccattgacagataataggtacattgtggtgaatacagacaatgttaccgtaggcaaagtgaatggctagagctaatgtatcaacatgggtaaatctgaaatacagtgtgtttgtgtgtgttatggggaaagtaaattgcagagggcacatacagcttggtatcatttatataaagttttacaacctacagaacaatactagacaatgtttatgggcatataaatgtataggaaacatttaaaacaggcatgagtattataaacactaactgctggatagtggctacttccaagaagagatgggatgggtgaagggtataacaggaccctcaaatgtttctgtaatggttaatttcataagaaaaaaatctcaaacaaatatgagatgaatgacaagatttagtaaagctgagtgatgggtccaaggctgttcatctgtgtatcagtcaagttttccttcaataatactgaataacaaacatccctcaaagcttacagcaacaaactcttataacttgctcacaggactgccagcctcatgtggctgtgcagggcttggctgggctcagctggagctgactccaggctatagtttgggtttaatatgctccagggagtctgggggaggtgactcacacctataatcccagcactttgggaggctgagacaggcagatcacaagcccaggagttcgagactagcctgtgcaacaaggtggaacccagtctctactaaaaatacaaaaaattagccaggtgtcgtcatgtgcacctgtggtcctagttatttgggaggccaaggtgggaggatcacttgagcccaggaagtcgaggctgcagtgagctgtgatcatgctactgcactccagcctggtgacagagtgagaccctgtctcaataataaataaataaataagcttcagggtttcctcatcctggactagcagctttcctaggatagcttcttttcatggcaacgtgcagaagtgcaagaggctgatgcaaacacatttacagctgctactcacttcacattgcttactttcccccggccacagcaagatcgatggtcaaccttcccaaccttaaatgggcagagaagtgcactcctcccgtagaggtggagtgaggagagaagattcactgaactataacaaaatctagtacaatcacaatctactttagtctattataaatattctcaggaaaattaaaagggagtaagattcttgtgacaagccacagaatactgattcctactgggattgcttttcttttgggcatctctgtcattatttaaaaaaaaaaaaaaaagcaagcctggctttcaacatttgagaaggcccagaatttaaagctcagtagcagatattctctatggctggtgttgtgggggaggctcaacagtggtccgtgaatacacaagttcaagatatacaatccaaatggacaaataagagatgcattcagccaaatgattattccagtaagaaagaaaaaattgtcttcaatgcttctcctttttttttttttttttttttgacagagtctcactctgtctcccagggtagagtgcaatggcccgatctcggctcactgcaacctccacctcccgagttcctggattctaagtgattctcgtgtctcagcctctggagtagctgggattgcaggggtgcgccaccacgcctggctaattttgtgtttttagtagagatggggtttccccatgttggccaggctggtctcaaactcctgatcttaggtgatccaccctcctcagcctcccaaagtgctgagattaccggtgtgagccaccatgcccagcctaatgcttctcctttgataaatgttttttctaaatcttggagggtcacttttcaaaagtgttatttacataccatggctattagatatgatgtcttacatttgtgtttaacttacttttagttatcctttgatacaagagaagagagagaacaggcggtgagctcagtctctgaattgagactcctaaattattttacatatagctcaaggttttcaatccaatgtaggagcccaagcactgaatccattggccagagattactcatggctgcctttcttaaacattttataaaaatggaaacactacttttctgcaagtttcttttttgcctaaggctatctctcctgatgaatacatatggctctacctcattcaatttaacatctatctagtattccattttaaggatggaccactgtttacccaactaattccttgttcaggaacttgggttgcttgcagtgtttcactataataaattaaactgcaaagaactcaccttccatatacacttttgtgggtttgtgggggtgtttccgtaggataaactcttagaagtggcatttctgggtcaaagattatatgcatttttaattttgatagatacagccaaatggctctccaaagggttgtatcaatttgcactcctgccaagagggtatgagagggcccatttcattgctcagaatttaaaagtgcttaatcagacacaggcttgatgaacacttcagaagctgttagaaaaatacagagaatgcatatgtttctattgtgaatatgcctctgctacaatgcttcctggactcattaagtaggtcccaccctgtactgatagagcttggttccaccaaatttttagcacaggccacttctaagaacttttgggagtgcccatgctacagtgaaggtttagagaaagggtaaatgaaaatgtgaaaatgtagaaccaggttggctgaggctttttattttattttaaaattttaattaaaaaaattttttttgagatagtatctcactgtcacccaggctggagtgcggtggctccatctaggctcactgcaacctccgcctcctggacttaagtgatcttcccacctcagctcccaagtaactggtactacaggcatgcgccaccatgcttggctaatttttttctatttttttgtagagatgggggtctcgccatgttgcccatgatggtcttgaactcctggactcaagtgatctgcccatctcagcctcccaaagttctgtgattataggcatgataatttttttttttttttttttttgagacagagtcttgctttgtcgcccaggctggagtgcggtggtataatcacagctcactgcagcctccaactcctgggctcaaggacttctcccatctcagcctactgagtaggctaggagtaaatgtgcatgccaccatgctcagctaaattttttactaaatttttttttttttttttttttgtagagacagggtctaagctatgttggcaaggcttgtttcagatcctggcctcgagtgattctcctacctcagccccccaaagcactggaattacaggtgtgagtcactgcacttggctggctcatgctttctactactaagatgctgctctaaggatcttgtactatgcattttacaataccttttaaaaaacaatcatttatggaaattgaagaacaacaactctctttaactgaataactccagtacctttaccacaaattacaaatggcttcttttcaatgtagtcttcatttttaataatgttttcagatttttgaaactcattttgtaacattgctgaatattgaatattgctgacctcaatatagaccatcagggagtctcatcagagctttcaccacacactgttaggcaggctcggcagcaatgtagcagagggcagactctcagatgaagaaacaaggatgttgtcacatatcctgggcatcttcatgatgtgccaagatgttgcaatgctctgctgggaaaccatgggtggagtcaatgtattgaggagactaaggtcataggttggattttcaggtgaaccaggtggccttattctgtccatggaactggtatctctaatatctgtcaaacactatgtcccaggaaactgagcaagagtcaggagagacctggactcttctaccatgcagcctagaaaatagctcacagctcctgacccctgatggtcagagcagagcatcttgtttgacacagcaatgggcctagtagaaggagcattggtcagggggaagagactgagtttccagctgtgaccagtgtgatctctggcaggtcagctaacctgtttgcacctctgggttttcatctgtgaaaggagtattaggctcagtgatgtctaattttcctccttctgttctaaaatctcatcatcatctttaactggtgtggtgccaggagaccctagaagaaattctcctttgtgggaagagttaatcagagtgcccaggtgcagtgactcatacctgtaatcccagcactttgggaggccaaagtgggaggattgcttgaggccaggagtttgagaccagcttgggcaacatagtgagaaaaagaaagaaaagaaagatgggaagggaaagggaaagaaaagacaggaaaagaaagaaaggaagaaaagagagaggaaggaaaggaaaggaaggaaaggaaagaaaagaataaaagaacaaatcagattaagcacatttgcaaatgtgttcaaccttggccacttgcttcttttaaactggtccttctcaatctttgttgcacatggaatcacctggggagtgttaaaaatgctcggtgcccaagctgtaccccagatagattacactagcatttctggggcagggcccaggcatcagtggttttttgcttgtttgttttttgagatggagtctcactctgttgcccaggctggagtgcagtggcgctatctcagctcgctgcaacttcctcctcccaggttcatgccattttcctgcctcagtctcctcagtagctgagactacaggcacccaccaccgcacccggctaatttttttttttttttgtatttttagtagagacggggtttcaccatgttagccaggatggtctcgatctcctgacctcatgatccatgcgcctcggcctcccaaagtgctgggattacaggcttgagccaccgcgcctggctggcatcagtgtttttaaagcaattccagtgtgcagctaaggatgagaagcaccgatgctggcctttggtcaagaatcctggaaaaggggcttatcttcaggctccagagtcatctgtgctctcatccgtcatgcctggttgctctcccccctactctctggtgaccttttaaaaagttaattctttcccctcttttttgctctggcttgtcattgaactcacccagctgattgtggcgcttatgattgagaacctcttctgaccgcttccctttccccagaaattaacatgatcattaaggcttataattttactcaccagtgctatcaatcaaggggctgcaaaaaggagttaagagtccttttgtaattggcagcagcctgtgatttggagcagagcatccagggtctgtgggaggctggaggtagggagggcctggggtgcagggagggctctgtcccccttgagctgactcccaaaacttcccccaggggctagaaagcttcagtcttcctcttccctgaatatcaaaataaggaagccagttcttgccaatgggactccaggctcaccccaagctctgcaataggaaggaaggtctctcacagcatccctgggataaggaagatcagagaattctgtatacactaggcaacccatgtctggctgaggaggggcagtgggcccagattatctgtagttcagaagtggggttgagactgtcagacccaaggaggtgatccatccttccctagtctccttggaactttgtttagggcaacaaaaatggcagctgaacctgatgcaatgcaccctctgcggctccccgcagcccaggtaactccatgctccttccacatgcagcgagctgcagaatcacagtgccccaggacaagggctgaccttcccttctgggagggctgggctgtctgaagacatttctgacccatgcagtgccttgtggaatattttatagatacatggtaagtggtatgtatgccagaggtgatagggtagttattctctctctctctcttttttttctgtttttgagacagcgtctcactctgtcacctaggctgcagtgcagtggtgagatctccactcactgcaacttctgcctcccaggttcaagctattctcctgcctcagtctcccagatagctgggattacaggtgcatgccaccatgcctggctaatttttgtattttttagtagagatggggtttcaccatgttaaccaggctggtctcgaactcctggcctcaagtgatctgcccaccttagtctcccaaagggctgggattacagtcatgagccaccacgcccagccctattttatttcaaatacaacattgtaacaacatgaaagtgatttatttttattttcattatttatttatttaagatggagtatcactccgtcgcccaggctggagtgcagtggcgcaatcacagctcactgcgacctccgtctccttggttcaagcaattctcctgcctcagcctcctgagtagttgggattacaggcgcccaccaccacgtccggctaatttttgtatttttagttttgtattttagtttcaccatgttggccaggctggtctcgaactcctgacctcaagtgatctgcccacctcagcctcccagagtgctgggattactgccaaagtggcatgagccactgcatccagccttttttttttttttgataacactataggaaaatctggagagggataaatcacctataattctacttctctaatacaactattttatttttgcctatttttttctatttcctgcacatgtacctatgtattttaacataattgtaatcagagtaaacatgttttgcattctgatagccctcttaacattcgatcactgacattgttagtagtggttatgaagtctagaattccttttggtgtttgcataataattctgttacttggtgtgtgccatcattttacctgccactcactgttttggctaattaggcccaacaaaaatgtttaaggaaatcagttcgcaatatacgaaacagcatgactatgacttacccgtggagattagattcccagttcttacctcctaagagtgggactcagcaagtgtgaggtagggccctggcacctgcatttcacaaccctgatgccattggtcctcactctgtacttcctgaaacactgccctgaggcttgctgagtttcttcagggaccatcaatgataggggcttggttacagccaccacagaaacaccaagagcagttgctttcatcttcctttccaattaacaccaaggttgggcagaagattagagttaatatctcttcaaaaatcgtgtgtaggggctgggcgcagtggctcatgcctgtaacccagcattttaggaggccgaggtaggcggatcacctgaagccaggagttcaagaccagcctgggcaacatggtgaaaccccatctctactaaaaatacaaaaaatataaatagctgggcgtgttggtgcaaacctgtaatcccagctactagggaggctgaggcaggagaatcagttgaacccgggaggcggaaattgcagtgagcggagatcccgccactgcactccagcctgtgtgacagaatgagactgtctcaaaaaaaaaaaaaaatatatatatatatatatatatatatgtgaaatacatatacacgcacacatatatatgcatatgtgtgtgtgtgtgtgtgtgtgtgtgtgtgtgtgtatctcacatgtgggtggaccaggtgcggtggcttattcctgtaatcctagctgcttgggaggctgaggcagaaggatggctagagcccaggagttcaaggctgcaataagttttgtttgtgccattgcactccagcccaggcaacagagatcctgaccctggaaaaaaaaaaagaagaaagaaaagaaaaagaaaagaaaaaacaacaacaactgtgggtcacactggagctgcttctccacggggctgttctcccccacctgggcactggctctcctggaaggccgtgccgcaggacatgtcagcaccttgtggctctaggtcacatctgctccaggtgcctttgttccagtaactcaatactcagatgatggggtagtacgaagggcccacattttgcagctggtggagatctgggcagtcagcacagggaagggggcagtgagggatggcttggctcatgctgggccttgctcctggcagcccgggcctctctctctgcacacacaggctgcacttgccagcatctcttctctcccaagccgaaaccgtctggcagtctctttgacctgttcactttcctcctctttggtgtcttggtggtccagaattatctgcagaaaggaaaatgcctgccttaccttcctttatttgccttaaacctcccaaatctgggtctagcccagctataagcagaggctgagcaagcaggccccggagtgaggctgggcccagaaaatggctccagaaaccaccagatgaccacgagtagactatggtgagcacttggagtaactgccatatgattccacccaaaatctggctgcagctcaacttctttcagaaagagagagggagctgccacgtctgaaaaatcaagtcagtgaccagcccagccacctgccatgtcctagcctgagttttgtttcagggccacggtcatgaacttattcttcgctttgttatgggatctctggggtgttgatttttctggctagaaacctctgtggcctgagtttctgtcctgcatccaggaagaatgaggtacacagacaagtgaagggtgaagaagatgaagagttttatttagtgttaaaacagctcagaggagacccacagtgggtagctcctctttgcaggcagatcatcccatggagtgttcagctctcagcagagaggaggccctggaggggttggctcctctctgcaggcaggtcatttggatgtctctgcaggtctctgaagctctcagcagagagggtcgtcttgtcttcccatcgtctctctgccctcttctcctctggccatcctctgccctgctctggctgaacccagctttcatggacctcagaggggaggaagtgggtgccaattggtccatgggcggccatgggtgccgtgaagaggcaccaccagtccccactccagtctgtgggactggcagcctggccttcagccttcaagccctctctggcctgcaagtggggccttgctggggacctgcccccttcaggccaggactctgtctgccactgccattcaaggcccggggggctcagccccaacaccactccaagataggagcaggcgccaggagtggagagaggccagtcagtgggaacagacaccctcgaacctgtagggatgcggaggaggtggggagtgtccttcctggggcctctgaatgtgcaggctgcagcgatgcagaggtccagcacctaggagggccaggcagtgggagcagacaccccccaatctgcagggattggggcggggagtttccttcctggggccccccgagggtacaggctgcagagacgccgggtcctgtgcctaggagggtggctgtagtctcagcagatcctgcctgcacccagccctcctccaagagcataaggagcctcgaattcacagctgcagtttgggtggctgtagccccgcccaggagtcgtgggactcctgcctgctccacagagcaggaggcctgggtctgcagctgtggtttgggaggctgcggcagctctgggagttcccatcccaactcagaaagggcagagctcccgatggggctctgactggctccacggagtgtgcagccccagccgtgcctccctgctgcagtcggcgtgatggcagcatttaagtacaagccataagaatcgttataaatgaccaataaaataactggggtgataatttaaatatatatgttgcctggtttctgaggggataaaaaccaacttacattttctcatcagcttcatatccctcatattgtcttaattttagttttgtttcttaattaccttattttattttattttacttttttttgagagctggtcttggtttgttacccaggatggagtgcagtggcatgatctcatctcactgcaggctgcatctgttgggctcaagcgatcctcccacctcggcctcctgagtagctaggactacaggtgggcaccaccacgcccagctaatttttgtattttttgtagagacaaggtcttcctatgttgcccaggctggtcttgaactcctgggcccaagcaattcactcacctcagcctcccaaagtgctgggattgcaggcatgggccactgaggctggccttaattgccttattaatacagattcacggcatgaaaggaagggcgcaatggtaaaacctaccaaagaaattgaagctgtgtaactagatacatcagctctgaaaaatcaacaaattattctctaggactgtagtcctttatttcaaaaaggattctcaaatgcatatgttagtggaattggcaaatttactaaaatttccatttgctttgaatttttatgtggtgcacacattcactctaggaggtgctgcctgtctctgggagagaatcaaagagagaagaggaagctttaggacctgacccccggggcccgggaggctggacctcacactgtcagtgccttcttcctccagagaggtacagtcatggaggtcagcaggcctgcaagacaagatctggacagtttgaatttttttggcggtggtggtggggggacggagtttcgctcttgtcgcccaggctggagtgcagtggtgtgatcttggctcaccgcaacctctgcctcccaggttcaagtgattctcctgcctggagacagggtagaatcccagactggtctcaaactctttgcctcaagggatcctcccacctgggcctttaagttgtcttttcatctacattttcaaaaaaatctatcacgtagtttttaatttgcattatttaatttatttatttagagacgtggtttcgctctgtcacccaggctggatggagtgcagtggtgcacagctcactgctgccttgaccccctgggctcaagccaccctcccaccttggcctcttgagtagctgggaccataggcacacgccaccacgcccggctaatttcccctgcttctttcttaatatggaggtactgactcagtgtttacatttgaggctttcttctgattccccctgcccgagggctttgtctcacagtgctcttgccaactgcttccccgcaggccctccccagcagcagtgccagggctgaggacaaagtgcaccaggcaagcttctgtttggtgctgaaatgtgtgggaatgactatgggaaggttagagagtggtcagtggtgtcgcatttctgcacgagtacagatccaggatagagaaacatatttccatttctcagtaaattcttagaaatcaggaatacttcaaggaactatttttaatttttttggtcttttaagcaaatcattgatatgtgtgcaacatggatgactcttaaaacattatgtggagcgaaagaagccagtccgaatagaagtgtagtgactggcccaagtctgggtgacttcaaagcctgtgttctttcaaccactccccaacggccccccagctccctgaatcccaggcctctccccttggtttctagtctgagccccaggtcggctgttaggggaggcccttggacaagtcccttcccataatgagaggcttagatgagattgcttctaagatttgttatagttctaacatcctagcaccttccaagtctatttcttttaaaaaattgacttgtttttggccgggtgcaatggctcacacctgtcatcccagcactttggaagctgaggcgggcggatcacaaggtcaggagtttgagaccagcctgaccaacatggtgaaaccctgtctctactaaaaatacaaaaattagctgggtgtggtggcacttgcctgtaatcccagctactcaggctgaggcaggagaatcgcttgaacccgggaggcagaggttgtagtgagccgagatggcgccactgcactccagcctaggcgacagagtgagactccacctcaaaaaaaaaaaaaaattaatttactttttgaatagttaatagtcacatgatacaaagctcaaaaggatatatatgtcagagaccaggaaactaaagagacaggaggactaagtgaaatatggtttcctggaatggatcctggaacagaaaaaggatattctttaaaaactagtgaaagtggcccagcactgtggctcacacctgtaatcccagcactttgggaggccaagatgagtggatcacttgagcccaggagttggagaccagcatgggcaacacagtgagacccgcacccccatctctaaaaaaatttgaaaaataattttaaaaaaaattagtgaaagtcaaagtttggaatttggttagtaacaatgtaccaatgctagtttctttctttctttctttttttttttgagacggagtctcactctgttgcccaggctggagtccagtggcacaatctcggctcactacaacctctgcctcctgggttcaagcgattctctggcctcagcctcctgagtagctgggattacaggtgtgtaccaccatgctcggctaatttttgtgtttttggtagagatggggttttactatgttgaccaagctggtctcgaactcatggtctcaagtgatcgcccaccttggcctcccaaagtgttgggattacaggtgtgagccaccacacctggcccagtgctaggttcttagttttgacaaatatgccatggtcctgtaagatgtcagcatgaaggggtatataactctttgtactcttacaacttttctgtaaatctaaaattattccaaaataggccaggcacagtggcttatgcctataatcccagtactttgggaggccaaggtgggtggatcacctgaggtcatgagtttgagaccagcctggttaagatggtgaaaccccgtctctactaaaaatacaaaaattaaccaggcgtggtggcaggtgcctgtaatcccagctacttgggaggctgaggcatgagaatcactcgaacctgggatgtggaggttgcagtgagctgagattgtgctactgcactccagcctgggcgacaagagcaagactctgtctcaaagaaaaaaaaattattccaaaataaaaagggtttttgtgttttttgtttttaaagtaatgttttccttttgcccgagtcattgagccacccagtccccaagccagacaaccaacgttcaatgttatctgtttcttatataatctttcagatatattcaattaatattcaaagaaaatgtatattctacaaatatatctccaaatagaaagtgtgtctctgagataaattcctagaagtgggattcctgggcatatagttttcatagttattgccaaattgccttccatagaagttgtaccaatttatcctcccaccagacaatgtgtgtgaggacctgttgtatcatcaacacagactgtggtctgagagtgaactggtattcacttacctcagtttaagtcagactgtcaactctcaaagtgctcttgaaaaaaacttctctagaaagctgctacaaaatggcggctccattctcgagggagtagaggcaagcagggagctggctgcagtggcaaagggcagcaaggccatgaagaagcgcttgccaaatgattaacattcctgtcgccaattactactgtcctcaagaggagaagacattcacagaagggcattgtctctgctccacagcacacaaagggtcaagcctcacagatttgctcctagttgggggaaaaaccctcacaggtcaaagtgttcagattacagattcaggaaaatccctttgcagaaagaagacagcaaatccccagtgaagttgaaaggacaaaactttcttcacctcagagactctccaatgaataaaccggttaaacatggtttggatttagtgaacatgaaaacaactggattaaagtataatctagctagaaaggaaaggacatgtgctgagacaactagctaagtaatgacaaagctgcagtgtttacatctgtcaagcaggaacggccattccagctttataactgaattctcttaaatgtttaatttttctttagctcaacgtgagcctctgctcgtgttggcctctttgataacactggcaccaaggcaactgtgtgagcacgacgggtgtagagtccaggagtctgcaggcagcagctgtcagggcgagtgttcggcatgggccttggccaagctgcacacggtccagcttggaggcagcatccatcgcacaggtgcaggttttagaatcacaaagacttgggtttaaatcccaattgtactttttactggctgtgtgaccttggacaaattaaactctgtcccatttcctctcttggtaaaatgaagataatacccatccaatagggttgttttgagaattaaatgaggtaatacatgtaaaagcctacaccgaaacctaaacactcaataggtggtcggatcaccaatctctttctgtctctcctgctcctgctcccccttgcacacacacctgaccaccaagtgaacctgttccacgtcagactaactccaggcacttcagatcttactctgtgacaggagcattcagagtttttacattagggcttcttaaacgtgtttgtaaagatccctactcaaatatctgtttgtaaaagtataaaataaaatacatgggattataaaagaaaccaacttattgaagtatgtttattaaaatatttttaaaacttgtgataaaatatgtgcttctttggaaaatgttaaacaagctgggtgcggtggctcacgcctgtaatcccagcactttgggtggccgaggagggcggatcacttgaggccaggagtttgggacccgcctggccaacatggtgaaaccctgactctactgaaaaacaaaacaaaacaaaaaattaggcatgtgtgtgcctgtagttccagctacttgggaggctgaggctggagaatcgcttgaacccgggaggcggaggctgcagtgagccgagattgcaccactgcactctagcctgggtgacagagtgagaccctgtctgaaaaaaaaaaaaaaaaaaaaaaattaaacaagatcagggagtgagtctgataactacaataattttcaagcagtgatcagtgtattccaagatttgcaacaacaaatgtgatataattaatatacttgcattttctaattggtgacagtcaaaagtcctgcttctactaatactctggtttacttccacattcataatggaagaaataattaatttcagttacagaatattaaatatgaccccctaactctcttccttagagcagaagaaaaaaatattaaagatacaccgttttcccattcaaattagactccaggtattataaaatattaccacctctgttctcaagactagtgataaaagatacttacaaactgtcaagccagcagtcccttattttacttttttctctgacttctttcaagattttatcttggtctttggttttttgcagtttgaacgtgacatacatgacatccctaggtgtttttgttattttttttttttttaccaacaaggttattctttttaaatttattccgcttggtgttctctcagcatcctggatctgtggtttggttcaccaattttggaaaggtctcagccattattacttcaaacatgtagacagtttgaacaatacaggtttgaactgcgcaggcccactcatacgtagcctttttcaataaaagtaacagaatgtgcctgtccctcctgcctccccttccacctcctccacctctctgcctccccacccctgagacagcaagaccaacccctcctcttcctcctcttcctcctcctcagcctactcaacatgaagatgaggatgaagacctttacggtgatccacttccacttaatgaatagtgaatatgttttctcttccttatgattttcttagtaacattttctttagcttactttaagaatacagtacacaatacatgtaacatacaaaatatgtgttaagtatattatcagtaaggcttctggaaaactaggctattaaattttgggggagtcaaaagttatatgcaaattttcaactatatgcagggttggcacacctaacccctgcattgttcaactgtatatatttttttgctctactctctttcaggtattccaattacacatttgctataccttttgaaatgatcccagtttttggatggtctgggtttttatcctactctttctcttcccatttcagtttgggaagttcttattgacctaccttcaaattcactaattgtttcctaaatttgtcaagtctatttatgagtccatcaaaaacatttttcatttttattatagtgattttgatttttagcatttccttttgagtttccatctctctgattacccatctattcttgcacgtctactttttccattacaacttttaatatgttaggttataattatcaaacagggaatctgtgtcatatccaactctggttctgattgctttctcttttcaaactgtttttacttgctttttggcatggcatgccttcaaattttttgttgaaagccaggtatgttgcactgggtaatagaaactgaggtagacaggccttaagtgtgaaggttcatggtaatcttgctggaggacggactatgtttaatgtttgctgtagttacaggtgccagaggcttcaccttcctctagtgtctttgcttttgcctgtctcttaactttgggtttccctaattactcctccacaaagggggacttccagctgtaatccactacgattacactcgaatcccactggtgcggtggtaaagtgtgggaagtgggatattctataatcttcagattaaatctgtgtcttagtgggcctgtgagcttcacaagtgtttttccagtggtagagcgtttcctttctggccccctactcccttccctggctgcagcatttccagtctatttccttgaaatcctgacccctcttgactaagttcccatccctgccccatgtaagtaagacaggaagcctagaggggggctagagtgggaagaacgcccttcccccaactgggataggctctgggagtctttcaccctggagagtaagccttcgtaataaaggttttggacattatttcataatgattattaatcccttttccacgtcagagccacacatcttactagatcttcactgaaaatgtggtgggattcttggaggtgaagcccacgaacttgtggagacccctcttaacactgtgatccccagggacttctcactctcacgctcacccacactcagccgctagcaattcattgccatctaagtgtttctaactagcttatggctccagtagcttttgctccagataagcagattttggctgtctctctttagatagccctgtttctccagattttagggtggtggtttgcccttcaacctcaattctctgatgggtccaagaaaagtcattgattttgcatttgtacagatttttcttgttgaaaggacaaagtgataactttttctcttgagacagggtctcactctgtcacccaggctggagtgcagcagcgcaatcatggctcactgcagccccaccctcccaggctcaggggatcccccacctcagtctcccaagtagttgggactgcaggtgtgtaccaccatccctggctaatttttttatttttatagagactgggttttgccatgttgtccaggctggtcttgaactcctgggctcaagtaatctgcctgcctcggcctcccaaagtgctgtgattacaggtgcacaccactgtgccaggcttggtgccaactttcaagctttttacctgtagaagcttaaaccagaattatttcattctggccattcccttccatccacctgaactgctgtgtcccttcttgtcctcacatttgcgatgactactgtccctcttagtgagtcttttcatgactggtgttcgatctctcctgtctgttagcactttgcacaatcaagtgcttggtgttgctagttgagtccactgggtcgctttcatttctggcactcactctacagtaaagagcatctgggatgaggtgttgttgcccagcatcctctaagcttcctttgtgcttttaaattaatttccctggcctccaaatcagtcttattttcttagcaaggttggaataaagcaaacttcactttctgtaaatcaggatttacaaaagtaatttctcaagatctggtaagtccttttttctcaatttcttgatttctttttgtaatgacttaagtagccaggtaagatcggatttggccaagttcaaggaaatcatagggcctcctatctaaatgactaaacctgacagttttggaattacttgggaaactttaaaaaagaaaatcctaaatgcagtcctaagagagtaattgtggtgggcagctatgtttaggaaaatacgatacttctagtaagctgtgcatgtccaaaagagctacttacacctaaacttaaaatcaaaactaaaaaacatactagggagacaaagtgaaaatactattagaaaaaccaaaccaaacctatccattcgtaacaaaggacataggaattgtttaacattcaccctttcactcattcagtaactgtattgaaagtcataggcacggctgggcgcggtggctcacgcctgtaatcctagcactttgggagactgaggcgggtggatcacttgaggtcaggagttcgagacgagcctgaccaacatggtaaaaccccgtctctactaaaaaaatacaaaattagctgggcatggtggcgcatgcctgtaatcccagctacctcaggaggctgaggcagaagaattgcttgaactcaggaggcggaggttgcagtgagccaagatcacgccactgcactccagcctggggaacagagtgacactccatctcaaaaaaaaaaaaaaaaaaaaaaaaaaagtcataggccctgtccacaagaaggaagtacaccaagccatggcctttagaatcaaacgtcttcacagtttaaatgcagtaccatcctctcctggttaaccttgaaaattctgctcaagctttcaaaacctcagtcttctcatttgtaaaaataacattatctacttcatagggaagttctgtgacagagatcacagtggaattattacaaacttattctctctatcccaaaacagttttaactcctttcctagcctaaacactggcatattgttagtaatagcagctggcacccactgagtattaatctatatgcgagggagtgggctaaactctgtccatccatacctcaaacacattttatctgtaaaggccttagaggccacagccttattctttcattggccatattcgccccactcatgtaaccaaaaaaggcaaagcaagcagaggcaacaggacggaattttaatctaggatggcctcctagcaaagagggctgagtggaaaaaccatgggatgtataaaaaggagatgctcctcctcccctaacaccccttccccaaagtcataatcactaccaggggtcatgatgttagaacctctgggtaggaaaccaaataccagataaacctattctggaactgccatggcaaatgagtaagagtggtaccatttgctactactactattatgactaccactgccaactgataactattattatgcttttatatgttccgacactgtcctatgaattttacatgtaatcctcgatgtaagttataaagttaccactgatattgaccctttataactggcaggagttgagacaaggcaattaaatacttgaatagtggacacagagcctgagattccttagaattatccatctattgctttgtaactcactgccaaattaatttttttttaggaagattcttaagggattctggaaccccctcctatgtagttagaattaagagcacctgcatttttacttcagcgggttaaaggcatagtttcactataaaccatggtctcaatttcctacaagataacactgaaaagcaccttcctccattaggcaaaaacacgttacctggaataaacttttcacctactttaaaacccttgacttttcaagagcatgcctgcccttaggaaattgtggtagaggttaaaagcgggcaggctagtacaagccatcctaaaccacgctattccttgtctgtaaatgatcaaaatcaagactccacggtgagtggaaaccttgacactactaacatttttctgctgtgggaggctggcttgttcattttaagaggtttagcagcatctctgacatccacctgttagagtccagtaacattccctagttgagacaaccaaaaatatcttcagacattgccaaacgtcccctgggggacaaaatcatccctggttgagaaccactgctttattttaatgtttaacagaaaaaaaaattttcttttgagactgggtctctcactcttgcctaggctagaattaagtggcatgatcttggctcactgcaacctcaacttcctgggctcaagatacacttccacctagccacccaagtagctgggactacaggcacacaccaccatgcccagctaatttttaaactttttgtagagacatagtctcactatgttacccaggttggtctcagaactccgggcctcaagcaatccccctgccttggcctcccaaagtgctggcactacaggtgagagccactgtgccttgccgagaaccactgctttaaagaattatttggttttgcagagctaccattattctgttctgcatacccaaaactgacagcctctgactttacttctctagttcactgaaataaaatttacatgttgtttagctttgtaccttcttacagtaattgaaacatccagtattagggaactgtgaaatactgtttgagcaacaaaaggccttatggggcaactctgacttcttcctatgacttctatgtgcttggtggacatcctagtttggccaagacccaagcttgtttccttttaaatggactgatccatcttcagaggagacgcatctgctgtaggaggacaaaatttctttactttgggatttaactccaagtcacaatgggtccccaaaccaccgcaagttgtacaaactagagaccacattctggctgaaaggtctgaacacaacacaagttaggcagcaagaagtcatgtgttttctggtatcttatcatttttgcaggtcaggctagaagactgtgcccttctcttaaagaggataaagtgtgctactatcccaaaccaaattaaagagaaagcacaaacctgctgactaagaagagttattacacccttgctaagtttgtttaaacaagtcactcagttgactaggaaaaaacttctgaaaaataggagaaatggtattttatctttgaaagtccttttaataaatgagattataaagcagttttcaaatacacaaagtgcttcaaaatgattcaataagccttaagcaatacattttttagtatatcacttttgttgttgttaaaaataccccattcaatggatggaagtatatttgatatcaccactgtttaaagggaatggagttacaggaatgagaagtatataattagtaaataatccctctcaacaagtgacttaagtagtcactcatagagagcaaaaaaagctggaggcaacacaatcagtgcatatcagaaatgcattttaatttttatttgaaaacaacttaaatttttagacaaatgattttagtatataaatttgcttttgtttttatacagaatataaagatttccctcattaatcttccatgtgaagggtattacaagcctggaggaagatactttctgcacacaagtatgtatcttatgtgtgcagtattggaaaccaatggtgtagtgctcctacacataaatggggtcaagtgacatcacaaattaaaagggggaaagagaaatattctagttaatcagatgcaagaagcaaacaagacgcaaaaactgtgcaaataagaccaagccagtaactttagttacgacactgcagattacactggaataacaggtttgtgaggctatagtgtgcaccacattaaaacagcaagaaagagctatttatatagaaaggctggaatgagggatttttactaaagcaaattaacttcttgtcaactgccaaaacaaaacaaaactgagcatatgagtgttagtatactgaaggcatgttataccagtttctgtgcagcatgctaaaagttagaacttcttcactggtgcttatcaatcattaatagtcacgtttttgccccttcttgccaaatttcaggcatgtcttattttagatggagtatagcttttatctattatttcatcttgtaaaaacatgtgaagacaacgttcgttctgtgccagaggatgaccagcgaccctgagaataaaaaatataaatttagtccaatattttatacaaggtgggggagttcaaaacacatattttaaagttgagaagcatgtataatttttttttttttgagatggagtcttgctctgttgcacaggctggagtgcagtggctgatcttggctcatggcaacctccgtctcctgggttcaagtgatttcgtgcctcagccccctgagtagctgggactacaggcgtgtgccatcatgcccagctaatttttatatttttactagagacggggtttcaccatgttggccaggctagtctcaaatccctgacctcaagtgatctgctcacctcagcctcccaaagtgctgggattacaggcgtgagccactgcgcccggctcagaatcatgtacagtttaccaataagtattattctggactgtccataaagctatgcactatcaactaatggtatatgttcttttgtttggttcacaactctaattaagaaaacattaatcacaaatttttcactgcttgtggcacatgtacccaattagctttacatcatagctggtgtattcataagaaacttaaattaattttaatgttaaaagtgaagcatgtcaattgatcctaagaatcttttttttttttttttttttttgagacaaaagtgttgctctatcacccaggctagagtgcagtggtgtgatcttggctcactgcaacctctgtctcccaggttcaagcgattctcctgccacagcctcctgagtagctgggactacaggtaaacaccaccacgccccactaatttttgtatttttagtagagacagggtttcgccatgttggccaggctggccttggaactcctgacctcaagtgatctgcccacctcggcctcccaaaatattgggattacagacatgatccactgtaccaggccagagtctattttaaagaggagaagatacaggattgaagttagaaatacaatgaagttcaataaaagcccaaaatactaaaaaaacaggcacaaatatccaggtattttgtttgtttttgcctgcttaaaaccacactgggcaaccggactattatttcagaatttaaaaatatctaatataggccaggcgtggtggctcatgcttgtaatcccagcactttgggagaccaaggcaggcagatcacttgaggtcaggagtttgagaccagcctggccaacatggcgaaaccctgtctctactaaaaatacaaaaataagccagacacgatggtgcgcaactataatcccaactactcaggtggctgaggcatgagaatcacttgaacctgggaggtggaggtttcactgagccgagactgcaccactgcactccagcctgggcgacagagcaagactgtctcaaaaaaaaaaaaaaaaaaatctaatatagtactgccttctccaaaaggaaaacagattcacagacaatgaatattgagtgctacagtagataaccaagggctttatgtaaccctttctctcctgtttaccactcatggatcttcaaatcactagataaaatttacagtgtaagctcacattaccatattctgtacgatttgatttacttttgctagtttaaggccaatgcacaattacagtgaggtctttcttggcataaatctttctaacactctggctttctattattttacaaaatagctatatttcaaatgggaataaaattaaaagctaaaaatattggtttgagcttatcaagagtttctaaagtaaaaaagaaacaatcctaagtcttcttacattttcaaaagaatacattttaccatgaaaattaaaaacatgcacctttatacaagacatgctaatacctccatctgcaatcaaacaagatgattgcaagtacattgtaagttttattgttcatgctagaacataccttaaatcagaaagaatcataagtaaaactgtattttttaaatgccgtaattttaaatgtaatttgcataaattaaccaagaaaaacaaatacaaaacgtaggtcaacacaaagatgctcatttcaatcactcaaatgtgttaatatttatcacatgatattcaacttgtcagatacttttactttgtttaaatgatatgaaaagttaggaaatggctgaaagaaaaggcaacagtgcagtttagcttaacatctaaactacaagtagtcacttaaagtagtcctacactttgaggaataggaagcacttacttgtttataaactgctccagcccttgttttctttcctcaataaaattgtcatcaaatattccatcatctcctctaaaaggaagctgacgcaaaaacgctttcccagggagcgggggaactacgacctaaaatgtgaagacagaaactccttgatcatgatgactgggttgtgaaaatttatagagcacaacatgaagacaaagcatgtcctcactatgacagccatcgtccggtcaaactagttgaaatataaaagagcaaaaaatacactgaaaaaagaccaaatgtttagacaaatgcagaatagcccatcagacaaaagctcctaattcaaaggcagggcccatagcttatatcatttttcttggccttatcaaagcccaggtatacaaagagaacactcacaacactgaaataaaggttaccatgcccctcagacacttgtgatgccacttggagaaggcaatgccttattgcaatggaaactgcagagatcaaaatcaactctcaattaaatgaagaaacgttaatgttctctctgcaacatggttaggtaagaattctggtttcagccgggcgtggtggctcatgcctgtaatcccagcactttgggaggccgaggcgggcagatcacagggtcaggagatcgagaccatcctggctaacacggtgaaaccctgtctctactaaaaaatacaaaaaatgagccgggcgtggtggcgggcgcctgtaggcccaactactctggaggctgaggcaggagaatggcatgaacccgggaggcagagcttgcagtgagtggagatcacgccactgcactccagctgggctacagagtgagactccgtctagaaaaaaaaaaaaaaaaagatttctggtttcttcaacctcttaccatctgcatacagtctttcctacttgtgtttgaggtgatgacaaaataccaataactctagttgtcactattctgtttcctaaattaagaaacaagtcaactttctcccaaatgccctatcctgctgtcttttcccaaagacctgtcatttctcccttctcgcactataggaagatcccaaattttccccttcaaagcctaaccaagggtcaactcctgctgatctctcccttctgggaattatctggagctcaaatattattctgggccaggtgcagtggctcacatctgcaatccctgcactttgggaggccaaggcaggcgggaggattgcttgaggccaggaatttgacacaagcctgggcacatgtctacaaaaataaaaaaaacttagctgggtgtggtggtgtgagcctgtagtcccagctacttaggaggcggaagtgggatgatcacttgagtccaggagttcaggactggagtgaactaaaatgtcgctgcactccagcctaggtgacagcgagaccccgtcttaaaaaaaaaataaatttttaaaaatgttattctggagctcaaaatacttgttttgattaaatagcacctagctatttcacaggttagtttggtttctctaccctagcactactgagaatcagataagttttgtactggggggctttcttgtgcattcttttctttcttgagatggggtcttgctctgtcacccaggctggagttccgtggtgcgatcatggctcgctgcagcctcccccagactcagatgatcctcctgcatcagcctcccaaatagccgggacactacaggtacatagcgtgctaccacgcctggctaatttttctattttttgtggagatggtgtttcactgtgttggccaggctggcattcttttctttagcagcatccctagcctctgcccactagacaacatagcacccccagctgagacaataaaaaatgtctctagacagtgtcaaacgtctcctgggggataaaactgcctttggtggaaaaccatcaatctatcatactaatgtcttcaaatcaagacccctgtcttaggcttcttgtggttattttaagaaaaactgggcatacaacagaagctcaaatatctgttaaatgaccaaccacttagctggatccttactttaaacgcaaacagagaaatgtgtaagcaaacaatcagaacaaggagaaatatatatagtaaactgatacatatttttcttttcaccaataatacaaattacacatattcaaaaaaattaaaactttaaacccttgatatagtttctacaacgagttgtttatcctcaaacaaaattcaatagggtaaaaaagggaaagagcaactcgacttcatatagattaacaaaaaacaaaataaaaacaaaaaaaccaaatgtccaaataaactttataatcccttcctagatttactctcctcagatgaccaatgatgaagatatctatggatttgtctccgtaaatttatgctagcattctcagatctcacccccatgttaacatctgtttagttgagagttaaaatctgcagggaccttctataactgagaaacaaaggaatgctaaccattacgttccagtagaatggctatctggtgggcagggaaaaatatctgtatctacacaattattatttaaaaaaagaattctggaaccactgtgttaaataaatgaccaccattaattcagggtagaatttagcatgaaacttaagaaaaggatagctcaaggatgtcagttaaagaaagaaggaaaatgataaaaaatgtaacaatatatatataattaaatatatataaatttcatatataatgggaatttaagaaaaggatagctatgcattatcctctgtagagatacactcttcctaacatattcaaactagtcattcaaatggatggggaggtggtaggcaacaggattaatgatctataaaaatcataaatggctcatccagctaagattctcttctacatcaaattatttttgctgaagcagtctgaaaacacctaactggaattctaacaccaggttgggtgcggtagctcacatatgtaatcccagcacttcaggaggccaaggtgggtggatcacctgaggtcagaagttcaagaccagcctggccaacatggtgaaaccctgtgtctactaaaaatacaaaaaattagccgggcatggtggtgcatgcttgtaacccctttactcaggaggctgaggagaattgcttgagcctgggaggcagagattgcagtaagccgggactgcaccacggtactccagcctgggcgagagctagacaccgtctcaaaaaaaaaaaaaaaaaattctaatactaattaaaaagtcatgaatgcaaagatatgtgcgtgcatgtggggtgagaaataggagaatatctggtgagcacaatatattgaaagctaaagcaaactagaataaaagctaaaagatctgaccataatacatgtcagctaatttctagcttagtttaacagatcttagttaaaagtactaatataccacaaaataacttgattacattgttctttgcaatactgtaatacgagtaaaactttcacatggatttaactctcaatatatttaactggtctaatgttaaatgtgaagtattgtgcttcaaaggacaacatcaagaaagtgaaaaacaacccagagactgggagatatgtgcaaattatgtatctgatagggaactctaagagtcttatatattctcgacataactctataataaaaagatgaacccattgaaaaaggcaaaagctctcaataaagatgtctccaaagaagatacataaatgaccagtaagtatatgaaaagaaaatcaacattagtggccattagagaaataaaaatcaaaaccacaatgcaataccccttcacaaacagtaggatagctataataaagaagacaggcaattggtaaggatgtggagaaaagtagaacctcacattgctggtaagaatgtaaaattacacagctgctttggaaaaacggtctgccaattcctcaaaaggttaaaaagagttatgacccagcaatgtactggtaggtatatactgaaaagaaatgaaaacacatgcagacagaaacctatgcacaaatgttcacagcagcactaccaataacagccaaaaagtagaacaaaatgtccaccaaataagtgtataaataagatgtggtataagcatacaataggatattatttaggaataaaaagaaatgaagtaattgatgcatgttagaaaagcatgaactgtgaaaacatgttaagtgaaagaagccagacacaaaagatcacatattgtgggcttccatttacatatgcccagaatgggcaaatccacagagaaaggagactagcaggtggttgccataggctgagtgaggaagggttggggagaaatcagtggtgtctactaatggggacagggtttcttttattgggtgataaaaatgctctaaaattgactagtgctctaaaatagtgatggttgcacaactctgtgaacatattaaaaaccagtgaattatacactttaaatgggtgaattgcatggtatgtgaattatatctcaataaagctgttactaaaaacaaaagcggtcgggcggggtggctcacgcctgtaatcccagcacttcgggaggccaaggcgggcggatc

SEQ ID NO: 202 - DNA, 4263 bp, Homo sapiens
  CDS (1)..(3705)
gggaatacccagcttcctccccgcaacccggtgaaagccaacgcaatgttcggtgcgggggacgaggacgacaccgatttcctctcgccgagcggcggtgccagattggcctcactttttggactggatcaggcagctgctggccatggaaatgaatttttccagtacacagccccaaaacagcctaagaaaggccagggaacggcagcaacaggaaatcaggcaacaccaaaaacagcaccagccaccatgagcactcccacaatactggtcgcaacagcagtccatgcatatcgatacacaaatggtcaatatgtaaagcagggcaaatttggtgctgcagttctggggaaccacacagccagagagtataggattcttctttatatcagtcaacaacagccagttacggttgctaggattcatgtgaactttgagctaatggttcggcccaataactatagcaccttttatgatgaccagagacagaactggtccatcatgtttgagtcggaaaaggctgctgtggagttcaataagcaggtgtgcattgctaagtgcaacagtacctcttccctggatgcagtgctctcccaggacctcattgtggcagacggccctgctgtagaagttggagattctttggaagtggcctataccggctggctctttcagaatcatgtgctgggccaggttttcgactccactgctaacaaagataagttgcttcgcttgaagttaggatcaggaaaagtcatcaagggctgggaggatggaatgctgggcatgaaaaaaggaggaaagcgattgcttattgtccctccagcctgtgctgttggctcagaaggggtaataggctggactcaagcaacggactcgatcctggtgttcgaggtggaggttaggcgggtgaagtttgccagagattctggctctgatggtcacagtgttagttcccgcgattctgcagctccgtctcccatccctggtgctgacaacctctctgctgatcctgttgtgtcaccacccacatcaatacctttcaaatcaggggagccagctcttcgtaccaaatctaactccctcagtgaacaacttgcaataaatacaagtcccgatgcagtcaaagccaagttgatctctcggatggctaaaatgggccagcccatgctgcccatccttccaccacagctggattccaatgattcagaaatcgaagatgtgaacactctgcaaggaggtgggcagcctgtggtgactccgtccgtccagccctctcttcagccggcccatccagcgttaccacagatgacctcacaggcacctcagccatctgttactgggctccaggcaccttctgctgccttaatgcaagtgtcatctctcgattcccactcagctgtatctggaaatgcccaatcctttcagccctatgcaggtatgcaagcctacgcttatccccaggcatctgccgtcacctcccagctgcagcccgttcggcctttgtacccagcaccgctctctcagcctccccatttccaaggatcaggtgatatggcttcatttctcatgactgaagcccggcaacataacactgaaattcgaatggcagtcagcaaagtggctgataaaatggatcatctcatgactaaggttgaagagttacagaaacatagtgctggcaattccatgcttattcctagcatgtcagttacaatggaaacaagcatgattatgagcaacatccagcgaatcattcaggaaaatgaaagattgaagcaagagatccttgaaaagagcaatcggatagaagaacagaatgacaagattagtgaactaattgaacgaaatcagaggtatgttgagcagagtaacctgatgatggagaagaggaacaactcacttcagacagccacagaaaacacacaggcaagagtattgcatgctgaacaagagaaggccaaggtgacagaggagttagcagcggccactgcgcaggtctctcatctgcagctgaaaatgactgctcaccaaaaaaaggaaacagagctgcagatgcagctgacagaaagcctgaaggagacagatcttctcaggggccagctcaccaaagtgcaggcaaagctctcagagctccaagaaacctctgagcaagcacagtccaaattcaaaagtgaaaagcagaaccggaaacaactggaactcaaggtgacatccctggaggaggaactgactgaccttcgagttgagaaggagtccttggaaaagaacctctcagaaaggaaaaagaagtcagctcaagagcgttctcaggccgaggaggagatagatgaaattcgcaagtcataccaggaggaattggacaaacttcgacagctcttgaaaaagactcgagtgtccacagaccaagcagctgcagagcagctgtctttagtacaggctgagctacagacccagtgggaagcaaaatgtgaacatttgttggcctccgccaaggatgagcacctgcagcagtaccaggaggtgtgcgcacagagagatgcctaccagcagaagctggtacaacttcaggaaaagtgtttagccctccaggcccaaatcacagctctcaccaagcaaaatgaacagcacatcaaggaactagagaagaacaagtcccagatgtctggggttgaagctgctgcatctgacccctcagagaaggtcaagaagatcatgaaccaggtgttccagtccttacggagagagtttgagctggaggaatcttacaatggcaggaccattctgggaaccatcatgaatacgatcaagatggtgactcttcagctgttaaaccaacaggagcaagagaaggaagagagcagcagtgaagaagaagaagaaaaagcagaagagcggccacgaagaccttcccaggagcagtcagcctcagccagttctgggcagcctcaagcacccctgaatagggagaggccagagtcccccatggtgccctcagagcaggtggtcgaggaagctgtcccgttgcctcctcaggccctcaccacttcccaggatggacacagaaggaaaggggactcagaagctgaggcactctcagagataaaagatggttcccttccacccgaactgtcttgcatcccatcccacagagttctagggcccccgacttcaattccacctgagcccctaggccctgtatccatggactctgagtgtgaggagtcacttgctgccagcccaatggcagctaagcccgacaacccatcaggaaaggtctgtgtcagggaagtagcaccagatggcccactacaagaaagctccacaagactgtccctgacttcagaccccgaggagggggacccactggccttagggcctgaaagcccaggagagcctcagcctccacagctcaagaaagatgatgtcactagctccaccggtccccacaaggagctgtcaagcacagaggcaggttccacagttgcaggagcagccctcagacccagccatcattcccagcgttccagtctctctggggatgaagaggatgaactgtttaaaggggcaactctgaaagctctgaggcccaaagcacagcctgaggaggaggatgaagacgaggtgagcatgaagggacgcccgcccccaacgcccctttttggagatgatgatgatgacgatgacattgactggctgggatgaagacccaggaaactggtgcaaaggtttctctgcaacccttccctaagcatgattttgcacagccaaccctgggtctaggcgagccacagggtgaggtcaaggtgagcattctgggaacaatatttgggctcagagggtgggttggccaccttctgagccccacccccgccagacctggtgaagaggatcataaccctgtcttcaagaacactgggatttcagcagcaagttggaagaaggactggtaggttcccctccaagccagtcacctgtaagagtcctgtcctctgccagactttttaatctcttcattaactctcagactgacctgggagccctcctctacctgaatccagtgctcaactgtgccccggcaacaagacctgggctgaggtctccctggtagaactaagggagattacaccatctaaatcccagtgcagtcaacagcctggcctatagtcctgggacatgtatcttcttctttgccttaaatctgatacaagaggtcaatgactttgaaaataaaactaaaataaatgtctataatgaaacttg

SEQ ID NO: 203 - protein, 1234 aa, Homo sapiens
GNTQLPPRNPVKANAMFGAGDEDDTDFLSPSGGARLASLFGLDQAAAGHGNEFFQYTAPKQPKKGQGTAATGNQATPKTAPATMSTPTILVATAVHAYRYTNGQYVKQGKFGAAVLGNHTAREYRILLYISQQQPVTVARIHVNFELMVRPNNYSTFYDDQRQNWSIMFESEKAAVEFNKQVCIAKCNSTSSLDAVLSQDLIVADGPAVEVGDSLEVAYTGWLFQNHVLGQVFDSTANKDKLLRLKLGSGKVIKGWEDGMLGMKKGGKRLLIVPPACAVGSEGVIGWTQATDSILVFEVEVRRVKFARDSGSDGHSVSSRDSAAPSPIPGADNLSADPVVSPPTSIPFKSGEPALRTKSNSLSEQLAINTSPDAVKAKLISRMAKMGQPMLPILPPQLDSNDSEIEDVNTLQGGGQPVVTPSVQPSLQPAHPALPQMTSQAPQPSVTGLQAPSAALMQVSSLDSHSAVSGNAQSFQPYAGMQAYAYPQASAVTSQLQPVRPLYPAPLSQPPHFQGSGDMASFLMTEARQHNTEIRMAVSKVADKMDHLMTKVEELQKHSAGNSMLIPSMSVTMETSMIMSNIQRIIQENERLKQEILEKSNRIEEQNDKISELIERNQRYVEQSNLMMEKRNNSLQTATENTQARVLHAEQEKAKVTEELAAATAQVSHLQLKMTAHQKKETELQMQLTESLKETDLLRGQLTKVQAKLSELQETSEQAQSKFKSEKQNRKQLELKVTSLEEELTDLRVEKESLEKNLSERKKKSAQERSQAEEEIDEIRKSYQEELDKLRQLLKKTRVSTDQAAAEQLSLVQAELQTQWEAKCEHLLASAKDEHLQQYQEVCAQRDAYQQKLVQLQEKCLALQAQITALTKQNEQHIKELEKNKSQMSGVEAAASDPSEKVKKIMNQVFQSLRREFELEESYNGRTILGTIMNTIKMVTLQLLNQQEQEKEESSSEEEEEKAEERPRRPSQEQSASASSGQPQAPLNRERPESPMVPSEQVVEEAVPLPPQALTTSQDGHRRKGDSEAEALSEIKDGSLPPELSCIPSHRVLGPPTSIPPEPLGPVSMDSECEESLAASPMAAKPDNPSGKVCVREVAPDGPLQESSTRLSLTSDPEEGDPLALGPESPGEPQPPQLKKDDVTSSTGPHKELSSTEAGSTVAGAALRPSHHSQRSSLSGDEEDELFKGATLKALRPKAQPEEEDEDEVSMKGRPPPTPLFGDDDDDDDIDWLG

SEQ ID NO: 204 - DNA, 2566 bp, Homo sapiens
  CDS (368)..(1105)
ctcgcctcagtctcctctgtcctctcccaggcaagaggaccggcggaggcacctctctcgagtcttaggctgcggaatctaagactcagcgagaggagcccgggaggagacagaactttccccttttttcccatcccttcttcttgctcagagaggcaagcaaggcgcggagctttagaaagttcttaagtggtcaggaaggtaggtgcttccctttttctcctcacaaggaggtgaggctgggacctccgggccagcttctcacctcatagggtgtacctttcccggctccagcagccaatgtgcttcggagccgctctctgcagagccagagggcaggccggcttctcggtgtgtgcctaagaggatggatcggaggtcccgggctcagcagtggcgccgagctcgccataattacaacgacctgtgcccgcccataggccgccgggcagccaccgcgctcctctggctctcctgctccatcgcgctcctccgcgcccttgccacctccaacgcccgtgcccagcagcgcgcggctgcccaacagcgccggagcttccttaacgcccaccaccgctccggcgcccaggtattccctgagtcccccgaatcggaatctgaccacgagcacgaggaggcagaccttgagctgtccctccccgagtgcctagagtacgaggaagagttcgactacgagaccgagagcgagaccgagtccgaaatcgagtccgagaccgacttcgagaccgagcctgagaccgcccccaccactgagcccgagaccgagcctgaagacgatcgcggcccggtggtgcccaagcactccaccttcggccagtccctcacccagcgtctgcacgctctcaagttgcgaagccccgacgcctccccaagtcgcgcgccgcccagcactcaggagccccagagccccagggaaggggaggagctcaagcccgaggacaaagatccaagggaccccgaagagtcgaaggagcccaaggaggagaagcagcggcgtcgctgcaagccaaagaagcccacccgccgtgacgcgtccccggagtccccttccaaaaagggacccatccccatccggcgtcactaatggaggacgccgtccagattctccttgttttcatggattcaggtgctggagaatctggtaaaagcaccattgtgaagcagatgaggatcctgcatgttaatgggtttaatggagagggcggcgaagaggacccgcaggctgcaaggagcaacagcgatggcagtgagaaggcaaccaaagtgcaggacatcaaaaacaacctgaaagaggcgattgaaaccattgtggccgccatgagcaacctggtgccccccgtggagctggccaaccccgagaaccagttcagagtggactacatcctgagtgtgatgaacgtgcctgactttgacttccctcccgaattctatgagcatgccaaggctctgtgggaggatgaaggagtgcgtgcctgctacgaacgctccaacgagtaccagctgattgactgtgcccagtacttcctggacaagatcgacgtgatcaagcaggctgactatgtgccgagcgatcaggacctgcttcgctgccgtgtcctgacttctggaatctttgagaccaagttccaggtggacaaagtcaacttccacatgtttgacgtgggtggccagcgcgatgaacgccgcaagtggatccagtgcttcaacgatgtgactgccatcatcttcgtggtggccagcagcagctacaacatggtcatccgggaggacaaccagaccaaccgcctgcaggaggctctgaacctcttcaagagcatctggaacaacagatggctgcgcaccatctctgtgatcctgttcctcaacaagcaagatctgctcgctgagaaagtccttgctgggaaatcgaagattgaggactactttccagaatttgctcgctacactactcctgaggatgctactcccgagcccggagaggacccacgcgtgacccgggccaagtacttcattcgagatgagtttctgaggatcagcactgccagtggagatgggcgtcactactgctaccctcatttcacctgcgctgtggacactgagaacatccgccgtgtgttcaacgactgccgtgacatcattcagcgcatgcaccttcgtcagtacgagctgctctaagaagggaacccccaaatttaattaaagccttaagcacaattaattaaaagtgaaacgtaattgtacaagcagttaatcacccaccatagggcatgattaacaaagcaacctttcccttcccccgagtgattttgcgaaacccccttttcccttcagcttgcttagatgttccaaatttagaaagcttaaggcggcctacagaaaaaggaaaaaaggccacaaaagttccctctcactttcagtaaaaataaataaaacagcagcagcaaacaaataaaatgaaataaaagaaacaaatgaaataaatattgtgttgtgcagcattaaaaaaaatcaaaataaaaattaaatgtgagcaaagaaaaaaaaa

SEQ ID NO: 205 - protein, 245 aa, Homo sapiens
MDRRSRAQQWRRARHNYNDLCPPIGRRAATALLWLSCSIALLRALATSNARAQQRAAAQQRRSFLNAHHRSGAQVFPESPESESDHEHEEADLELSLPECLEYEEEFDYETESETESEIESETDFETEPETAPTTEPETEPEDDRGPVVPKHSTFGQSLTQRLHALKLRSPDASPSRAPPSTQEPQSPREGEELKPEDKDPRDPEESKEPKEEKQRRRCKPKKPTRRDASPESPSKKGPIPIRRH

SEQ ID NO: 206 - DNA, 793 bp, Homo sapiens
  misc_feature (508)..(508): n is a, c, g, or t
  misc_feature (579)..(579): n is a, c, g, or t
ttgcttatcaaaagacatttaatacaattagttttcaacaaccccttggtggtccacatctacaaagatatccagcccaacccaaccccccttccaaatcccacccccacagaaaagcacatacttaccagaatttttagcaagtatggtttgggaatttttgtggtttttgttttttaaaaaaaggcccccagggcaagttatttacagtttaattgccactgtcaactgatctggaccttgatcgggaccgggacctctggcgatccacagatgctggagacttagatttacttagagaaccacgtttctggctcttctcaggcacgggagacctactaacagaacgggacttgctccggctccggctcctgctcctgcttcttgaccggctgtaagatttgcgactacgggaacgggatcggctacgagacctagaggaacttctggtccgggatcgagacctgcttcttgacctactgtgccttttgctgccttcaattaattntatttttctcccatttatttcctttccagaaagttgttcaatagcattctttaagtcaccataagaggcanactcaaccaccccttcatttaatttaggtcggtgtgcatccgcaaacgttacttccccagcttgtctcatgacatctttgagatgcatgcagctgactctcgaggataaatgctcaactataagacgattgtctgtgcttacaggtggagcattccgactatcatgtcgaggtctgcgactactaaaaccgacacgagatcgtgctctacctct

SEQ ID NO: 207 - DNA, 934 bp, Homo sapiens
gaagaagaaggaggttcctgctgtgccagaaacccttaaggaaaaagcgaaggaatttcgcagagctgaagatcaagcgcctgagaaagaagttgcccaaaagatgcttcgaaaggcaaggaggaagcttatctatgaaaaagcaaagcactatcacaaggaatataggcagatgtacagaactgaaattcgaatggcgaggatggcaagaaaagctggcaacttctatgtacctgcagaacccaaattggcgttgtcatcagaatcagaggtatcaatggagtgagcccaaaggttcgaaaggtgttgcagcttcttcgccttcgtcaaatcttcaatggaacctttgtgaagctcaacaaggcttcgattaacatgctgaggattgtagagccatatattgcatgggggtaccccaatctgaagtcagtaaatgaactaatctacaagcgtggttatggcaaaatcaataagaagcgaattgctttgacagataacgctttgattgctcgatctcttggtaaatacggcatcatctgcatggaggatttgattcatgagatctatactgttggaaaacgcttcaaagaggcaaataacttcctgtggcccttcaaattgtcttctccacgaggtggatgaagaaaaagaccacccatttgtagaagtggagatgctggcacggggaggaccagatcaacaggttattagaagaatgactaaggtgtctaccatgatcattttcttagctggtggttaataaacagtactgctctcaaattgaatatatgtggcttgcgattgcgctggtggtagtaggcggcctgtgttcccttaatatatggggcggggggggtgtaaaatagcaaaaagcccttcgggaaagggggcctgtgaaaacacctggctaaaggtttaaaaaagatgggcaagg

SEQ ID NO: 208 - DNA, 1324 bp, Homo sapiens
  CDS (148)..(489)
cggcacgagcgccgccgaggattcagcagcctcccccttgagccccctcgcttcccgacgttccgttcccccctgcccgccttctcccgccaccgccgccgccgccttccgcaggccgtttccaccgaggaaaaggaatcgtatcgtatgtccgctatccagaacctccactctttcgacccctttgctgatgcaagtaagggtgatgacctgcttcctgctggcactgaggattatatccatataagaattcaacagagaaacggcaggaagacccttactactgtccaagggatcgctgatgattacgataaaaagaaactagtgaaggcgtttaagaaaaagtttgcctgcaatggtactgtaattgagcatccggaatatggagaagtaattcagctacagggtgaccaacgcaagaacatatgccagttcctcgtagagattggactggctaaggacgatcagctgaaggttcatgggttttaagtgcttgtggctcactgaagcttaagtgaggatttccttgcaatgagtagaatttcccttctctcccttgtcacaggtttaaaaacctcacagcttgtataatgtaaccatttggggtccgcttttaacttggactagtgtaactccttcatgcaataaactgaaaagagccatgctgtctagtcttgaagtccctcatttaaacagaggtcaagcaataggcgcctggcagtgtcaagcctgaaaccaagcaataccgtcatgtttcagccaagcccagagccctaagattacaaacaactatggccggaacctcctcagctctccctctgcagagttccctaccctaagagaatgttaccacctgaacagtcctcggtgaatctgagaggagaggatggggtaaggcagaagcaccagctgtactactagaagggagcttttggtggtagatcccctggtgtctccaacctgactaggtggacagagctcaaagaggccctcttaccgctagcgaggtgataggacatctggcttgccacaaaggtctgttcgaccagacatatcctagctaagggatgtccaaacatcagaatgtgaggccaaccttctatcagagttaaacttttgacaagggaacaaatctcaaactgatccatcagtcatgtagctagctgtagagcttgcaacttaatagcagcagctgcccaatgccatgtgaagtaacaaactggtttttggtttttttttccccttcagttttaatgttatgtgtaatgtatttaaacccttatttaaataaaacttgttttcagaaaaaaaaaaaaaaaaaaaa

SEQ ID NO: 209 - protein, 113 aa, Homo sapiens
MSAIQNLHSFDPFADASKGDDLLPAGTEDYIHIRIQQRNGRKTLTTVQGIADDYDKKKLVKAFKKKFACNGTVIEHPEYGEVIQLQGDQRKNICQFLVEIGLAKDDQLKVHGF

SEQ ID NO: 210 - DNA, 1891 bp, Homo sapiens
  CDS (175)..(1218)
ccgaggctataagagggcgcacaagtggcgcggcgcaggagccgccgccagtggagggccgggcgctgcggccgcggccggggcgggcgcagggccgagcggacgggggggcgcgggccccccgggaggccgcggccactcccccccgggccggcgcggcgggggaggcggaggatggaaacacccttctacggcgatgaggcgctgagcggcctgggcggcggcgccagtggcagcggcggcacgttcgcgtccccgggccgcttgttccccggggcgcccccgacggccgcggccggcagcatgatgaagaaggacgcgctgacgctgagcctgagtgagcaggtggcggcagcgctcaagcctgcgcccgcgcccgcctcctacccccctgccgccgacggcgcccccagcgcggcaccccccgacggcctgctcgcctctcccgacctggggctgctgaagctggcctcccccgagctcgagcgcctcatcatccagtccaacgggctggtcaccaccacgccgacgagctcacagttcctctaccccaaggtggcggccagcgaggagcaggagttcgccgagggcttcgtcaaggccctggaggatttacacaagcagaaccagctcggcgcgggccgggccgctgccgccgccgccgccgccgccggggggccctcgggcacggccacgggctccgcgccccccggcgagctggccccggcggcggccgcgcccgaagcgcctgtctacgcgaacctgagcagctacgcgggcggcgccgggggcgcggggggcgccgcgacggtcgccttcgctgccgaacctgtgcccttcccgccgccgccacccccaggcgcgttggggccgccgcgcctggctgcgctcaaggacgagccacagacggtgcccgacgtgccgagcttcggcgagagcccgccgttgtcgcccatcgacatggacacgcaggagcgcatcaaggcggagcgcaagcggctgcgcaaccgcatcgccgcctccaagtgccgcaagcgcaagctggagcgcatctcgcgcctggaagagaaagtgaagaccctcaagagtcagaacacggagctggcgtccacggcgagcctgctgcgcgagcaggtggcgcagctcaagcagaaagtcctcagccacgtcaacagcggctgccagctgctgccccagcaccaggtcccggcgtactgagtcgggcatggcggccacctccaaggggcgggctcgcgggggggtgtcgtgggcgccccggacttggagagggtgcggccctccacccccccctccccgagtgtgcccaggaactcagagaggcgcggccccggggattcccccccgaggtgcccaggactcggaaggggcgccccggactcgacaagctggaccccctgctcccgggggcgagcgcatgacccccccgccctcgcgctgcctctttcccccgcgcggccgccccgtgttgcacaaacccgcgcgtctcggctgcccctttgtacaccgcgccgcaagggggctccgagggggcgcacgtcaaaccctgcctttcctttacttttactttttttttttctttggaagagagaagaacagagtgttcgattctgccctatttatgtttctactcggggaacaaacgttggttgtgtgtgtgtgtgttttcttgtgttggttttttaaagaaatgggaagaagaaaaaaaaattctccgcccctttcctcgatctcgctcccccttcggtctttcgaccgtccccccctcccctttttttgttctgttttgttttgttttgctacgagtccacattcctgtttgtaatccttggttcgcccggttttctgttttcagtaaagtctcgttacgcca

SEQ ID NO: 211 - protein, 347 aa, Homo sapiens
METPFYGDEALSGLGGGASGSGGTFASPGRLFPGAPPTAAAGSMMKKDALTLSLSEQVAAALKPAPAPASYPPAADGAPSAAPPDGLLASPDLGLLKLASPELERLIIQSNGLVTTTPTSSQFLYPKVAASEEQEFAEGFVKALEDLHKQNQLGAGRAAAAAAAAAGGPSGTATGSAPPGELAPAAAAPEAPVYANLSSYAGGAGGAGGAATVAFAAEPVPFPPPPPPGALGPPRLAALKDEPQTVPDVPSFGESPPLSPIDMDTQERIKAERKRLRNRIAASKCRKRKLERISRLEEKVKTLKSQNTELASTASLLREQVAQLKQKVLSHVNSGCQLLPQHQVPAY

SEQ ID NO: 212 - DNA, 619 bp, Homo sapiens
  CDS (94)..(585)
aggatcctcgaggccacgaaggccctctcccttcgcaaacgcctcccggctctcgtaagcctcccgccggccgtctccttaacaccgaacaccatgccttcaattaagttgcagagttctgatggagagatatttgaagttgatgtggaaattgccaaacaatctgtaactattaagaccatgttggaagatttgggaatggatgatgaaggagatgatgacccagttcctctaccaaatgtgaatgcagcaatattaaaaaaggtcattcagtggtgcacccaccacaaggatgaccctcctcctcctgaagatgatgagaacaaagaaaagcggacagatgatatccctgtttgggaccaagaattcctgaaagttgaccaaggaacactttttgaactcattctggctgcaaactacttagacatcaaaggtttgcttgatgttacatgcaagactgttgccaatatgatcaaggggaaaactcctgaggagattcgcaagaccttcaatatcaaaaatgactttactgaagaggaggaagcccaggtacgcaaagagaaccagtggtgtgaagagaagtgaaatgttgtgcctgacactgtaacactgtaaggat

SEQ ID NO: 213 - protein, 163 aa, Homo sapiens; identical to SEQ ID NO: 48

SEQ ID NO: 214 - DNA, 506 bp, Homo sapiens
  CDS (32)..(463)
ctctttcgctcaggcccgtggcgccgacaggatgggcaagtgtcgtggacttcgtactgctaggaagctccgtagtcaccgacgagaccagaagtggcatgataaacagtataagaaagctcatttgggcacagccctaaaggccaacccttttggaggtgcttctcatgcaaaaggaatcgtgctggaaaaagtaggagttgaagccaaacagccaaattctgccattaggaagtgtgtaagggtccagctgatcaagaatggcaagaaaatcacagcctttgtacccaatgacggttgcttgaactttattgaggaaaatgatgaagttctggttgctggatttggtcgcaaaggtcatgctgttggtgatattcctggagtccgctttaaggttgtcaaagtagccaatgtttctcttttggccctatacaaaggcaagaaggaaagaccaagatcataaatattaatggtgaaaacactgtagtaataaattttcatatgcc

SEQ ID NO: 215 - protein, 143 aa, Homo sapiens [sequence omitted]

SEQ ID NO: 216 - DNA, 1955 bp, Homo sapiens
  CDS (119)..(1438)
  misc_feature (1903)..(1903): n is a, c, g, or t
ggtcgcgcagctgtgttcgcggactcaggtggaaggaatttcttctcttcgttgacgttgctggtgttcactgtttggaattagtcaagtttcgggaatcaccgtcgctgccatcaacatgtcggtcccaagcgctctcatgaagcaaccgcccattcagtctacggctggggccgtcccagttcgcaatgagaaaggtgagatttcaatggaaaaagtgaaggtaaagcgttatgtgtccggaaaaaggccagactatgcccctatggagtcctcagatgaggaggatgaagaatttcagttcattaagaaagccaaagaacaagaagcagagcctgaggaacaggaggaggattcatccagtgacccccggctacggcgtttacagaaccgtattagtgaagatgtggaagagagattggctcgacatcgaaaaatagtggaacctgaagtggtaggagagagtgactcagaagtagaaggagatgcttggcgcatggaacgagaagacagcagtgaagaagaggaggaggaaattgatgatgaggaaatagagcggcggcgtggcatgatgcgtcagcgagcacaggagagaaaaaatgaagagatggaagtcatggaagtggaagatgagggtcgttctggagaggagtcagaatcagagtctgagtatgaagagtacacagacagtgaagatgagatggagcctcgccttaagccagtcttcattcgaaagaaggaccgagtgacagttcaagaacgtgaagccgaagcattgaaacagaaggagctggagcaggaagccaaacgcatggctgaggaaaggcgccagtacacactccagattgtcggagaggaaaccccaaaagagctggaagagaacaagcgatccctggctgcattggatgcactcaatactgatgatgaaaatgatgaggaggaatatgaggcatggaaagttcgagagctaaaaagaatcaagagggacagagaagatcgagaagcgcttgagaaggagaaagcagaaattgaacgcatgcgaaacctgactgaggaagagaggagagctgaacttcgggcaaacggcaaagtcattaccaacaaagctgttaagggcaaatacaagttcttacagaagtattatcaccggggtgccttcttcatggatgaggatgaagaagtatacaagagagatttcagcgctcctaccctggaggatcatttcaataaaaccattcttcctaaagtcatgcaggtcaagaactttggacgctcaggtcgcaccaaatacactcaccttgtggatcaagataccacctcctttgactcagcttggggccaagagagtgcccagaacacaaagttcttcaaacaaaaggcagctggggtacgagatgtatttgagcggccatctgccaagaagcggaaaactacctagggtccaactgcttattcttccaactgtggaacacaaggggagtctcagcatctggtccttgattgggttttttcattgtttccttggcccctgtatccagatattggacttactgctatacttgtgatactgggtagcccagactttgaaggtgctttgtgaggtttggactcatgctgagaaacccacaggaaagcactgtccaggtaggattagaggcttcccacttaaaactatttctgagaaatcttaggttttatcactgctatggtttcccatatttacttgggactgttctgactttctttttccagcccttagcttgggttagaaaagtggacatgtaagtgaacaatgcattacttctaccttaggtttaggagtaatatacccggaaatctaagctcatggaaacatgttttccatttggggttggagtccgtttttctagttgtacatacttgnggatccatatatgtgtgcatgtcawgaaataaaagaatcacacaacaaaaaa

SEQ ID NO: 217 - protein, 439 aa, Homo sapiens
MSVPSALMKQPPIQSTAGAVPVRNEKGEISMEKVKVKRYVSGKRPDYAPMESSDEEDEEFQFIKKAKEQEAEPEEQEEDSSSDPRLRRLQNRISEDVEERLARHRKIVEPEVVGESDSEVEGDAWRMEREDSSEEEEEEIDDEEIERRRGMMRQRAQERKNEEMEVMEVEDEGRSGEESESESEYEEYTDSEDEMEPRLKPVFIRKKDRVTVQEREAEALKQKELEQEAKRMAEERRQYTLQIVGEETPKELEENKRSLAALDALNTDDENDEEEYEAWKVRELKRIKRDREDREALEKEKAEIERMRNLTEEERRAELRANGKVITNKAVKGKYKFLQKYYHRGAFFMDEDEEVYKRDFSAPTLEDHFNKTILPKVMQVKNFGRSGRTKYTHLVDQDTTSFDSAWGQESAQNTKFFKQKAAGVRDVFERPSAKKRKTT

SEQ ID NO: 218 - DNA, 953 bp, Homo sapiens
ttttttttttttttttctcattaaacttttttaaggggtctcaaaattctgtgacaaattttgggtcaagtggtttccattaaaaagtactgattttaaaaactaataacttaaaactgccacacgcaaaaaagaaaaccaaagtggtccacaaaacattctcctttccttctgaaggtttacgatgctatggttcatcattaaccagtcttttactactaaacttaaagggccaatggaaacaaacagttctgagaccgttcttccaccacttgattaagagtggggtggccaggtataagggataatatccatttagccttctgagctttctggggcagactggtgtgaccttgccagctccagcagccttctggtccactgctttgatgacacccaccgcaatgtcggtctcatatcacgaacagacaaagcgacccaaaggtggatagtcggaaaagctctcaacacacaggggctggccaggaaccatatcaacaagggcagcttcaccagacttcaagaatttagggccactcttccagctttttaccagaacggcgatcaatctttatccttcagctcagcaacttgctgcaatgtgagccgtgtggcaatccaatacaggggcatagccgggctatgggctggagggtccaggataatcacctgagaggtgaagccagctgttccatgggggccattctgctggcccagcacgttgccgagaactcctgacagacacattctgaatggacgcaatgtcccgggaaagctaccaaagctcgggctttcgaaattactccgggacgtgggggaaggggccatacgggtggaacagccacgtcaacgaggaccaccacttctaacgtgagggcagcgcagcatatgggtacccacaacggcggcgcccagcctcaggggcggaaaaaagggggaacacactgtgacaa

SEQ ID NO: 219 - DNA, 1073 bp, Homo sapiens
  CDS (53)..(847)
ggcacgagggccagggccgcggttagtccctgctggccaccccactgcgaccatgttcgttccctgcggggagtcggcccccgaccttgccggcttcaccctcctaatgccagcagtatctgttggaaatgttggccagcttgcaatggatctgattatttctacactgaatatgtctaagattggttacttctataccgattgtcttgtgccaatggttggaaacaatccatatgcgaccacagaaggaaattcaacagaacttagcataaatgctgaagtgtattcattgccttcaagaaagctggtggctctacagttaagatccatttttattaagtataaatcaaagccgttctgtgaaaaactgctttcctgggtgaaaagcagtggctgtgccagagtcattgttctttcaagcagtcattcatatcagcgtaatgatctgcagcttcgtagtactcccttccggtacctacttacaccttccatgcaaaaaagtgttcaaaataaaataaagagccttaactgggaagaaatggaaaaaagccggtgcattcctgaaatagatgattccgagttttgtatccgcattccgggaggaggtatcacaaaaacactctatgatgaaagctgttctaaagaaatccaaatggcagttctgctgaaatttgtttcagaaggggacaacatcccagatgcattaggtcttgttgagtatcttaatgagtggcttcagatactcaaaccacttagcgatgaccccacagtatctgcctcacggtggaaaataccaagttcttggagattactctttggcagtggtcttccccctgcacttttctgatctaatttctgttttataccttatacccaaaacacttactaccaacacagctgttaaacattctatacaaaaaaattgtatgatctggtattaggaaattactttcacagtaaatatcaaagaaaaaagattaagggtctctttgccatgcttttcatcatatgcaccaaatgtaaattttgtacaataaaattttatttcctaagtaaaaaaaaaaaaaaaaaaa

SEQ ID NO: 220 - protein, 264 aa, Homo sapiens
MFVPCGESAPDLAGFTLLMPAVSVGNVGQLAMDLIISTLNMSKIGYFYTDCLVPMVGNNPYATTEGNSTELSINAEVYSLPSRKLVALQLRSIFIKYKSKPFCEKLLSWVKSSGCARVIVLSSSHSYQRNDLQLRSTPFRYLLTPSMQKSVQNKIKSLNWEEMEKSRCIPEIDDSEFCIRIPGGGITKTLYDESCSKEIQMAVLLKFVSEGDNIPDALGLVEYLNEWLQILKPLSDDPTVSASRWKIPSSWRLLFGSGLPPALF

SEQ ID NO: 221 - DNA, 768 bp, Homo sapiens
gctttttgaggaagacgcggtcgtaagggctgaggattttttggtccgcacgctcctgctcctgactcaccgctgttcgctctcgccgaggaacaagtcggtcaggaagcccgcgcgcaacagccatggcttttaaggataccggaaaaacacccgtggagccggaggtggcaattcaccgaattcgaatcacccttaaaaaagccgaaagctgataaatctccttggaaagggtgtgtgctgacttgataagaggcgcaaaagaaaagaatctcaaagtgaaaggaccagttcgaatgcctaccaagactttgagaatcactacaagaaaaactccttgtggtgaaggttctaagacgtgggatcgtttccagatgagaattcacaagcgactcattgacttgcacagtccttctgagattgttaagcacgattacttccatcagtattgagccaggagttgaggtggaagtcaccattgcagatgcttaagtcaaactatttttaataaacgttgatgaccaggtgctaaacactaaaaacacacacccaaccaacacaactgtggtgggcgcggcctggcgcctgaggaaaagttttctagacacccacgtttgggggcgcggccccactgggccgtcgcacctggtcatcccgtcccccgcgacccgggcaccaatcggccggggtttcccccaataaaacccgcgcgcccagcgttcggaccacccatggctcgggctccgggctcaggggtcagacttttgg

SEQ ID NO: 222 - DNA, 1505 bp, Homo sapiens
  CDS (96)..(944)
cctcgatcatctgtgaggatggctcaaaccggaactccttcatcatgggtttgaagtaatactggccagggctcaggtttgagccatcctcacagatgatcgaggtgcaggaaggccagaacctgaagatcaccatcacggggtaccgaaccgcttacagttgctatggcacagtgtcttccttaaacggagagcccgaacaaggggttgccatggaagcggtgggccagaacgactgcagcatttacggagaagacaccgtgacagacgaagagggcaagttcagattacgtggattgctgccgggatgtgtgtaccacgttcagctcaaggcagaaggcaacgaccacattgagcgggcgctcccccaccatagggtgattgaggttgggaataatgacatcgatgatgtaaacatcatagttttccggcagattaatcaatttgatttaagtggaaatgtgatcacttcctctgaataccttcctacattatgggtcaagctttacaaaagcgaaaacctcgacaatccaatccagacagtttcccttggccagtccctgttcttccatttccccccactgctcagagacggcgagaactatgttgtgcttctggactccacactccccagatcccagtatgactacatcttgcctcaagtttctttcaccgcagtgggctaccataaacacatcaccttgatttttaatcccacgaggaagctgcctgaacaggacatcgcacaaggatcctacattgccctgccattgacgctgctggttctgctggccggttacaaccatgacaagctcattcctttgctgctgcagttgacaagccggctacagggagtccgcgcgctcggccaggcagcctctgacaatagcggcccagaagatgcaaagagacaagccaagaaacagaagacaaggcggacttgaggaggaaggggacagttgcagtctcacttgggacaggccacagccaggggtccggccactacccgcccgtgggataaaagccaaaagcatgcgtcagctaacttcagcctgtgctgctgggcccgcaccccatgtcccttgtcactgtggcatcctgcacccatcctcacccctccgtagagcccctcgtgcaatgcaatgaatggaccctcctgtcactctgctgaacagaatttattttctgagtcaaatataatttattattatttttgtcaaagaagtatttaagctgtgctgtggtgtgagaatgtcattcttgatcttcagccttcgtttgcaagaagagttccagttgacgtggtgtttggttccatggcggggtaccctagggattcatctgttttcttcacttccctttgcatctgagatcctgctggaaaccacagcaacctgtatccactattaggaggtaaaaatcaataaaatggcccattcatttgtgttgtagctcaaaaaaaaaaaaaaaaaaaaaaaaaaaaaaaaagaaaaaaaaaaaaaaaa

SEQ ID NO: 223 - protein, 282 aa, Homo sapiens
MIEVQEGQNLKITITGYRTAYSCYGTVSSLNGEPEQGVAMEAVGQNDCSIYGEDTVTDEEGKFRLRGLLPGCVYHVQLKAEGNDHIERALPHHRVIEVGNNDIDDVNIIVFRQINQFDLSGNVITSSEYLPTLWVKLYKSENLDNPIQTVSLGQSLFFHFPPLLRDGENYVVLLDSTLPRSQYDYILPQVSFTAVGYHKHITLIFNPTRKLPEQDIAQGSYIALPLTLLVLLAGYNHDKLIPLLLQLTSRLQGVRALGQAASDNSGPEDAKRQAKKQKTRRT

SEQ ID NO: 224 - DNA, 792 bp, Homo sapiens
gttttactggaaaggaaagatgatgctcagttttaaacgttaaaagtgtacaagttgctttgttacaataaaactaaatgtgtacacaaaggatttgatgcttttctctcagcataggtatgcttactatgaccttccaagtttgacttgtataacatcactgtcaaactttgtcaccctaacttcgtattttttgatacgcactttgcaggatgacctcagggctatgtggattgagtaatgggatttgaatcaatgtattaatatctccatagctgggaaacgtgggttcaatttgccattggtttctgaaagtattcacatcatttgggataccagatagctcaatactctctgagtacattgtgcccttgatttttatctccaagtggcagtttttaaaattggccttttacctggatataaattaattgtgcctgccaccaccatccaacagacctggtgctctaatgccaagttatacacgggacagttgctggcatgtctttattggctatataaaatgtggccaagaagatatgctctcagtaagaagtctgatggtgagcagtaactgtccctgctttctagtataaagctctcagatgtgaccatgtgaatcatggtgggataatggactcagctctgtatgcttcatgccattgtgcagagtagcacccttatgcataagctttttaatgctgtacaatatagtcgctgaaagtaaatgccacctttttagcagtgaattaatggacagtctggtgaaacttcaatgctttttgatgtata

SEQ ID NO: 225 - DNA, 2555 bp, Homo sapiens
  CDS (1973)..(2470)
agagcttcaggccagaagataatccaacatgaggcctgaaagaaacttgggccagaaaatctccagggtacctgcccgccgaagtcccttccgaggactctcctgagccagtggctgagacatgcacatccatggtggaagctccaggtctgggcagccctctccctgcagtcacagactatgcccactaggaacacccacctgggacaaagcctggccacagtcagagagcaggacggctctcaccaagcccctcaggtggctccccgccgctgaccctgtgctgcgtggcacaggcttccccaacgccctgccacatttggcttcctccaagcaggctatgtgcttaggatgagatgtggctacttttagcaaacaacactagagtggcttcagcccagccacggtgacttctcgctcccataagagctcaagagggagaggtgatctccctccccagccactggggaccccagttcctgttgcctattctgccactgtcatcttcctgcaccacctcatggtcctggatggctgcacaggctctagccgtcatgcccctattccagctaggagaaagggggaagcataagtggcaaggagaagcaccctccccttcttcttttttttttaattgctctatacatttattattagctattattaatgcagaaccaggggacaaaaagctcacaaacactctacacaatttcacaagacacattgcaggggaaaaagtgactgagatggatcaacagtatgctagggtcttggtggactcattcctaggggaggtggacctctaattcctggtggagggggtctcattcctggagggggcatgcctactggtgtccctcgagcagagggaagcccaattggtgggcccgtgggtggcctcataccaggttcagaagctccaagtttaactgtggacattggatctgggggaacggcagtcgtgaccgtgggcaagagtagcaagatgctgccacacacggaccacagaatgagacgtatcctacaagatggccgagtcttcattggcaccttcaaggcttttgacaagcatatgaatatgatcccctgtgattgtgatgagttcagaaagatgaaactaaagaatgcgaagcaaccagcacgtgaagaaaagcgggtttcgggcccctccgcttctaaagaagcttgctgggggcgccacactcactgccattgctcagagcttggttacacggcccggccacaccaggccacacagagacaagaagcgcaatgtgctggcaaagactcttaccggaggagaaggggagaatggctgtctttgccaaatagcccgtcacgaacgtacccctgctgggcccccgcaagtgcaccaaccgactcgaaagtcccagagagggctggcgggcaaggacctgagtctccagccacccctgcaggaggagcccagggaccctcgcatccctgataaggaagcaggtggcgtgccctgctgtgaccccgaaacagcctgtagtctcaccctccatttccacgagactctaagtctgccgcttttgcagcaaaagcccagtgctgggggtgagcgtgtggggagtgtgggagacgggctctgacccggccaccctgggcagctgtgctcacgcagcacccccgccgttcccagctggacttcacctggcaggacagccaacaggcctcaccgtggcctccgtcccgggggtcgtgcatgggggactgggccagcccgagcagtgggacatgctgccttcctaccctgctccacctgccacaaacacaaactggaatgttctcagccacctccagacttcacaccctttgggctttggggcacagaggtcgggctgccctggggagaggagggagagaaggaggcttcgagagagcacggacatgagtcagacctgaaataaagcaaagccacaccgccccggaccctgcagccgcagagatgttgatgcctaagaagaaccggattgccatttatgaactcctttttaaggagggagtcatggtggccaagaaggatgtccacatgcctaagcacccggagctggcagacaagaatgtgcccaaccttcatgtcatgaaggccatgcagtctctcaagtcccgaggctacgtgaaggaacagtttgcctggagacatttctactggtaccttaccaatgagggtatccagtatctccgtgattaccttcatctgcccccggagattgtgcctgccaccctacgccgtagccgtccagagactggcaggcctcggcctaaaggtctggagggtgagcgacctgcgagactcacaagaggggaagctgacagagatacctacagacggagtgctgtgccacctggtgccgacaagaaagccgaggctggggctgggtcagcaaccgaattccagtttagaggcggatttggtcgtggacgtggtcagccacctcagtaaaattggagaggattcttttgcattgaataaacttacagccaaaaaaccttaaaaaaaaaaaaaaaaaaaaaaaaaaaaaaaaaaa

SEQ ID NO: 226 - protein, 165 aa, Homo sapiens
MLMPKKNRIAIYELLFKEGVMVAKKDVHMPKHPELADKNVPNLHVMKAMQSLKSRGYVKEQFAWRHFYWYLTNEGIQYLRDYLHLPPEIVPATLRRSRPETGRPRPKGLEGERPARLTRGEADRDTYRRSAVPPGADKKAEAGAGSATEFQFRGGFGRGRGQPPQ

SEQ ID NO: 227 - DNA, 448 bp, Homo sapiens
  CDS (90)..(281)
caaggtcgtgaaaaaaaaggtcttggtgaggtgccgccatttcatctgtcctcattctctgcgcctttcgcagagcttccagcagcggtatgttgggccagagcatccggaggttcacaacctctgtggtccgtaggagccactatgaggagggccctgggaagaatttgccattttcagtggaaaacaagtggtcgttactagctaagatgtgtttgtactttggatctgcatttgctacacccttccttgtagtaagacaccaactgcttaaaacataaggatgtttcagttcctccatttaacagatatgaagagcattttaagaggtgcagcctctggaagtggatcaaactagaactcatatgccatactagatatgtttgtcaataaacttatgacgtgaaaaaaaaaaaaaaaaaaaaaaaaaaaaaaaaaaaaaaaaaaa

SEQ ID NO: 228 - protein, 63 aa, Homo sapiens
MLGQSIRRFTTSVVRRSHYEEGPGKNLPFSVENKWSLLAKMCLYFGSAFATPFLVVRHQLLKT

SEQ ID NO: 229 - DNA, 703 bp, Homo sapiens
  CDS (13)..(624)
ggcacgaggaagatggcggaggtgcaggtcctggtgcttgatggtcgaggccatctcctgggccgcctggcggccatcgtggctaaacaggtactgctgggccggaaggtggtggtcgtacgctgtgaaggcatcaacatttctggcaatttctacagaaacaagttgaagtacctggctttcctccgcaagcggatgaacaccaacccttcccgaggcccctaccacttccgggcccccagccgcatcttctggcggaccgtgcgaggtatgctgccccacaaaaccaagcgaggccaggccgctctggaccgtctcaaggtgtttgacggcatcccaccgccctacgacaagaaaaagcggatggtggttcctgctgccctcaaggtcgtgcgtctgaagcctacaagaaagtttgcctatctggggcgcctggctcacgaggttggctggaagtaccaggcagtgacagccaccctggaggagaagaggaaagagaaagccaagatccactaccggaagaagaaacagctcatgaggctacggaaacaggccgagaagaacgtggagaagaaaattgacaaatacacagaggtcctcaagacccacggactcctggtctgagcccaataaagactgttaattcctcaaaaaaaaaaaaaaaaaaaaaaaaaaaaaaaaaaaaaaaaaaaaaaaaaaaaaa

SEQ ID NO: 230 - protein, 203 aa, Homo sapiens [sequence omitted]

SEQ ID NO: 231 - DNA, 3075 bp, Homo sapiens
  CDS (1)..(2577)
atggttaattttacggtggatcagatccgcgccatcatggacaagaaggccaacatccgcaacatgtctgtcatcgcccacgtggaccatggcaagtccacgctgacagactccctggtgtgcaaggcgggcatcatcgcctcggcccgggccggggagacacgcttcactgatacccggaaggacgagcaggagcgttgcatcaccatcaagtcaactgccatctccctcttctacgagctctcggagaatgacttgaacttcatcaagcagagcaaggacggtgccggcttcctcatcaacctcattgactcccccgggcatgtcgacttctcctcggaggtgactgctgccctccgagtcaccgatggcgcattggtggtggtggactgcgtgtcaggcgtgtgcgtgcagacggagacagtgctgcggcaggccattgccgagcgcatcaagcctgtgctgatgatgaacaagatggaccgcgccctgctggagctgcagctggagcccgaggagctctaccagactttccagcgcatcgtggagaacgtgaacgtcatcatctccacctacggcgagggcgagagcggccccatgggcaacatcatgatcgatcctgtcctcggtaccgtgggctttgggtctggcctccacgggtgggccttcaccctgaagcagtttgccgagatgtatgtggccaagttcgccgccaagggggagggccagttggggcctgccgagcgggccaagaaagtagaggacatgatgaagaagctgtggggtgacaggtactttgacccagccaacggcaagttcagcaagtcagccaccagccccgaagggaagaagctgccacgcaccttctgccagctgatcctggaccccatcttcaaggtgtttgatgcgatcatgaatttcaagaaagaggagacagcaaaactgatagagaaactggacatcaaactggacagcgaggacaaggacaaagaaggcaaacccctgctgaaggctgtgatgcgccgctggctgcctgccggagacgccttgttgcagatgatcaccatccacctgccctcccctgtgacggcccagaagtaccgctgcgagctcctgtacgaggggcccccggacgacgaggctgccatgggcattaaaagctgtgaccccaaaggccctcttatgatgtatatttccaaaatggtgccaacctccgacaaaggtcggttctacgcctttggacgagtcttctcggggctggtctccactggcctgaaggtcaggatcatggggcccaactatacccctgggaagaaggaggacctctacctgaagccaatccagagaacaatcttgatgatgggccgctacgtggagcccatcgaggatgtgccttgtgggaacattgtgggcctcgtgggcgtggaccagttcctggtgaagacgggcaccatcaccaccttcgagcacgcgcacaacatgcgggtgatgaagttcagcgtcagccctgttgtcagagtggccgtggaggccaagaacccggctgacctgcccaagctggtggaggggctgaagcggctggccaagtccgaccccatggtgcagtgcatcatcgaggagtcgggagagcatatcatcgcgggcgccggcgagctgcacctggagatctgcctgaaggacctggaggaggaccacgcctgcatccccatcaagaaatctgacccggtcgtctcgtaccgcgagacggtcagtgaagagtcgaacgtgctctgcctctccaagtcccccaacaagcacaaccggctgtacatgaaggcgcggcccttccccgacggcctggccgaggacatcgataaaggcgaggtgtccgcccgtcaggagctcaagcagcgggcgcgctacctggccgagaagtacgagtgggacgtggctgaggcccgcaagatctggtgctttgggcccgacggcaccggccccaacatcctcaccgacatcaccaagggtgtgcagtacctcaacgagatcaaggacagtgtggtggccggcttccagtgggccaccaaggagggcgcactgtgtgaggagaacatgcggggtgtgcgcttcgacgtccacgacgtcaccctgcacgccgacgccatccaccgcggagggggccagatcatccccacagcacggcgctgcctctatgccagtgtgctgaccgcccagccacgcctcatggagcccatctaccttgtggagatccagtgtccagagcaggtggtcggtggcatctacggggttttgaacaggaagcggggccacgtgttcgaggagtcccaggtggccggcacccccatgtttgtggtcaaggcctatctgcccgtcaacgagtcctttggcttcaccgctgacctgaggtccaacacgggcggccaggcgttcccccagtgtgtgtttgaccactggcagatcctgcccggagaccccttcgacaacagcagccgccccagccaggtggtggcggagacccgcaagcgcaagggcctgaaagaaggcatccctgccctggacaacttcctggacaaattgtaggcggcccttcctgcagcgcctgccgccccggggactcgcagcacccacagcaccacgtcctcgaattctcagacgacacctggagactgtcccgacacagcgacgctcccctgagaggtttctggggcccgctgcgtgccatcactcaaccataacacttgatgccgtttctttcaatatttatttccagagtccggaggcagcagacacgccctcttagtagggacttaatgggccggtcggggagggggaggcgggatgggacacccaacactttttccatttcttcagagggaaactcagatgtccaaactaattttaacaaacgcattaagaggtttatttgggtacatggcccgcagtggcttttgccccagaaaggggaaaggaacacgcgggtagatgatttctagcaggcaggaagtcctgtgcggtgtcaccatgagcactcagctgtactagtgccattggaataataaatttgataaggtgtgaaaa

SEQ ID NO: 232 - protein, 858 aa, Homo sapiens
MVNFTVDQIRAIMDKKANIRNMSVIAHVDHGKSTLTDSLVCKAGIIASARAGETRFTDTRKDEQERCITIKSTAISLFYELSENDLNFIKQSKDGAGFLINLIDSPGHVDFSSEVTAALRVTDGALVVVDCVSGVCVQTETVLRQAIAERIKPVLMMNKMDRALLELQLEPEELYQTFQRIVENVNVIISTYGEGESGPMGNIMIDPVLGTVGFGSGLHGWAFTLKQFAEMYVAKFAAKGEGQLGPAERAKKVEDMMKKLWGDRYFDPANGKFSKSATSPEGKKLPRTFCQLILDPIFKVFDAIMNFKKEETAKLIEKLDIKLDSEDKDKEGKPLLKAVMRRWLPAGDALLQMITIHLPSPVTAQKYRCELLYEGPPDDEAAMGIKSCDPKGPLMMYISKMVPTSDKGRFYAFGRVFSGLVSTGLKVRIMGPNYTPGKKEDLYLKPIQRTILMMGRYVEPIEDVPCGNIVGLVGVDQFLVKTGTITTFEHAHNMRVMKFSVSPVVRVAVEAKNPADLPKLVEGLKRLAKSDPMVQCIIEESGEHIIAGAGELHLEICLKDLEEDHACIPIKKSDPVVSYRETVSEESNVLCLSKSPNKHNRLYMKARPFPDGLAEDIDKGEVSARQELKQRARYLAEKYEWDVAEARKIWCFGPDGTGPNILTDITKGVQYLNEIKDSVVAGFQWATKEGALCEENMRGVRFDVHDVTLHADAIHRGGGQIIPTARRCLYASVLTAQPRLMEPIYLVEIQCPEQVVGGIYGVLNRKRGHVFEESQVAGTPMFVVKAYLPVNESFGFTADLRSNTGGQAFPQCVFDHWQILPGDPFDNSSRPSQVVAETRKRKGLKEGIPALDNFLDKL

SEQ ID NO: 233 - DNA, 838 bp, Homo sapiens
  misc_feature (502)..(502): n is a, c, g, or t
  misc_feature (734)..(734): n is a, c, g, or t
tttcactgttgagaaaaatttattatcaatgtctcagagccaacgacgacacgaacctacatgaacacaactcttaatttaggacccaagggtgactgtaaacatgataggagcgctgggacattgtcactgaggcagacagcagccactagtccacaatggtttaaaaagtcagtcctgtgccccctcactggaagcttccattctgggccatctgcagatattccttgtagagcttctcctgagcctcgaagagcttcttcagcttcttggcttgccctttgctgagctctttgccctccatgtcatgtgtgggcagaccattttcatcaaacttggagtatttgtcggtttctgacaagaacatctcactggggggaatcttcatcttggccagctttgctgcttcttgttcctgtttcctccgggccgcctcctctttcttcttcctcttctcctcttcaacccgtctcttttcttctctctctgttaataaggtgtntctgtctaccagtttcaccactgtgggcagtccttcgtggtcttcaaaccgcaccccaagctcaggcaggatgttgtcccgcagggcatcgctgagctgcagaatctcagggacttgttgctgctcggcaatctttcgcactccttctcggaatcctgattacacctagagggtaggcatgactgtggcctcgaaactgaggcatgttaccagcccatacgaaccggaaatngccagagagctgtcctcttctaccggccccaaagatctcacacatatggtgaggtacaaggcgatgttcttcaacaagagctgggtgggaccttttccttcacg

SEQ ID NO: 234 - DNA, 2577 bp, Homo sapiens
  CDS (4)..(837)
cacatgtcggcgcaggcggccaaagtcagtaaaaaggagctcaactccaaccacgacggggccgacgagacctcagaaaaagaacagcaagaagcgattgaacacattgatgaagtacaaaatgaaatagacagacttaatgaacaagccagtgaggagattttgaaagtagaacagaaatataacaaactccgccaaccattttttcagaagaggtcagaattgatcgccaaaatcccaaatttttgggtaacaacatttgtcaaccatccacaagtgtctgcactgcttggggaggaagatgaagaggcactgcattatttgaccagagttgaagtgacagaatttgaagatattaaatcaggttacagaatagatttttattttgatgaaaatccttactttgaaaataaagttctctccaaagaatttcatctgaatgagagtggtgatccatcttcgaagtccaccgaaatcaaatggaaatctggaaaggatttgacgaaacgttcgagtcaaacgcagaataaagccagcaggaagaggcagcatgaggaaccagagagcttctttacctggtttactgaccattctgatgcaggtgctgatgagttaggagaggtcatcaaagatgatatttggccaaacccattacagtactacttggttcccgatatggatgatgaagaaggagaaggagaagaagatgatgatgatgatgaagaggaggaaggattagaagatattgacgaagaaggggatgaggatgaaggtgaagaagatgaagatgatgatgaaggggaggaaggagaggaggatgaaggagaagatgactaaatagaacactgatggattccaaccttcctttttttaaattttctccagtccctgggagcaagttgcagtctttttttttttttttttttttttccctcttgtgctcagtcgccctgttcttgaggtctcttttctctactccatggttctcaatttatttggggggaaataccttgagcagaatacaatgggaaaagagtctctacccctttctgttcgaagttcatttttatcccttcctgtctgaacaaaaactgtatggaatcaacaccaccgagctctgtgggaaaaaagaaaaacctgctccctttgctctgctggaagctggagggtgctaggcccctgtgtagtagtgtatagaattctagcttttttcctcctttctctgtatattgggctcagagagtacactgtgtctctatgtgaatatggacagttagcatttaccaacatgtatctgtctactttctcttgtttaaaaaaagaaaaaaaaacttaaaaaaatggggttatagaaggtcagcaaaggggtggggtttgagatgtttgggtgggttagtgggcattttgacaacatggcttctcctttggcatgtttaattgtgatatttgacagacatccttgcagtttaagatgacacttttaaaataaattctctcctaatgatgacttgagccctgccactcaatgggagaatcagcagaacctgtaggatcttatttggaattgacattctctattgtaattttgttcctgtttatttttgggtttctttttgtttcactggaaaggaaagatgatgctcagttttaaacgttaaaagtgtacaagttgctttgttacaataaaactaaatgtgtacacaaaggatttgatgcttttctctcagcataggtatgcttactatgaccttccaagtttgacttgtataacatcactgtcaaactttgtcaccctaacttcgtattttttgatacgcacttttgcaggatgacctcagggctatgtggattgagtaatgggatttgaatcaatgtattaatatctccatagctgggaaacgtgggttcaatttgccattggtttctgaaaagtattcacatcatttgggataccagatagctcaatactctctgagtacattgtgcccttgatttttatctccaagtggcagtttttaaaattggccttttacctggatataaattaattgtgcctgccaccaccatccaacagacctggtgctctaatgccaagttatacacgggacagttgctggcatgtcttcattggctctctaaaatgtggccaagaagataggctctcagtaagaagtctgatggtgagcagtaactgtccctgctttctggtataaagctctcaaatgtgaccatgtgaatctgggtgggataatggactcagctctgtctgctcaatgccattgtgcagagaagcaccctaatgcataagctttttaatgctgtaaaatatagtcgctgaaattaaatgccactttttcagaggtgaattaatggacagtctggtgaacttcaaaagctttttgatgtataaaacttgataaatggaactattccatcaataggcaaaagtgtaacaacctatctagatggatagtatgtaatttctgcacaggtctctgtttagtaaatacatcactgtataccgatcaggaatcttgctccaataaaggaacataaagatttaaaaaaaaaaaaaaa

SEQ ID NO: 235 - protein, 277 aa, Homo sapiens
MSAQAAKVSKKELNSNHDGADETSEKEQQEAIEHIDEVQNEIDRLNEQASEEILKVEQKYNKLRQPFFQKRSELIAKIPNFWVTTFVNHPQVSALLGEEDEEALHYLTRVEVTEFEDIKSGYRIDFYFDENPYFENKVLSKEFHLNESGDPSSKSTEIKWKSGKDLTKRSSQTQNKASRKRQHEEPESFFTWFTDHSDAGADELGEVIKDDIWPNPLQYYLVPDMDDEEGEGEEDDDDDEEEEGLEDIDEEGDEDEGEEDEDDDEGEEGEEDEGEDD

SEQ ID NO: 236 - DNA, 766 bp, Homo sapiens
  misc_feature (547)..(547): n is a, c, g, or t
  misc_feature (567)..(567): n is a, c, g, or t
  misc_feature (681)..(681): n is a, c, g, or t
  misc_feature (716)..(716): n is a, c, g, or t
  misc_feature (731)..(731): n is a, c, g, or t
tttttctttgctcacatttaatttttattttgattttttttaatgctgcacaacacaatatttatttcatttgtttcttttatttcattttatttgtttgctgctgctgttttatttatttttactgaaagtgagagggaacttttgtggccttttttcctttttctgtaggccgccttaagctttctaaatttggaacatctaagcaagctgaagggaaaagggggtttcgcaaaatcactcgggggaagggaaaggttgctttgttaatcatgccctatggtgggtgattaactgcttgtacaattacgtttcacttttaattaattgtgcttaaggctttaattaaatttgggggttcccttcttagagcagctcgtactgacgaaggtgcatgcgctgaatgatgtcacggcagtcgttgaacacacggcggatgttctcagtgtccacagcgcaggtgaaatgagggtagcagtagtgacgcccatctccactggcagtgctgatcctcagaaactcatctcgaatgaagtacttggcccgngtcacgcgtgggtcctctcncggcttcggagtagcatcctcaggagtagtgtagcgagcaaatccctggaagtagtcctcaatcttcgatttcccagcaaggactttctcagcgagcagatcttgctttgtgangaaacagatcacagagatggtgcgcagccatctgntgtcccagatgctcntgagaggtcagagcctcctgccagccgttggtctg

SEQ ID NO: 237 - DNA, 1620 bp, Homo sapiens
  CDS (200)..(580)
cggcgagccggaagtggggttagccaggttatccccaggggtggagaagcggaggcccaggaggagggggaataaagaaggtggaggatcctggctaccactctgaatccgataccgcttctcttagacctcagcgacagaaaaagggaagggtgtctcatcccccttcctcctctcctccctgtcctgagccttagccatggccgaggcaggggctgggctgagcgagaccgtcactgagacaacggttaccgtgacaaccgagcccgagaaccggagccttaccatcaaacttcggaaacggaagccagagaaaaaggtagaatggacaagtgacactgtggacaatgaacacatgggccgccgctcatccaaatgctgctgtatttatgagaaacctcgggcctttggcgagagctccacggaaagtgatgaggaggaagaagagggctgtggtcatacacactgtgtacgtggccaccgcaaaggacggcgtcgtgcaaccctaggaccgacccccaccacccctccccagcctcctgacccttcccagccccctccagggccaatgcagcactaaatccctctctcctccagcattcctgtgtctgtctggccctaaatgtatccatgtggctacttctccagccccctccttccctctcttctgcctgatagagggaagaggaagaggaggacgaacagagatcctgaaattctgacttgctgctattccagaacccagcctcctgggtttccccagtcctcatttttcctcccaatacccacccttctctctcgagggatctaggcaccttggtcccagtgtcttccttttgttctcactgccaaactgcctgtcctgggatctagttatcttggccctgcactctcaacatgagtagcgaacacttaaattgggttttcaacagtcccagctttcactgccagggtcccagtcagattccaggaatttgcgccctaactttgcttgctaatcctggtttagagctatcccactaaaatatttaatcctaattcttagtccttgcctgtgagatatgaggtcttacaggagacctcagagctcccagcccttctcctcctgctaacccttctcacaccctcaagaggagttagaaaagaggtccttgtcattctcacctcttatggaaaatggaataagaaataatcatatcctttcttcccacccttctcctgttatttaggatttctgacaaagctggcttgagattggtcacttagagccgactgtctcctctgccttttgtttttcagcttcagagacagatccaatatagtcccagggacctgggtctctgggagaggaaggaagagggagggagcaaagagattggggtatgtcccctgtagtacactcttacctcttacttcctagactttgatttctccggcagcccagatgttcagttctcttggcccctctctaccccttactgggatctggttttcattttccggtccttttgccatacacagttacagagatcagtcaaatccataccaccactgagatctcatttattgccacagatgcacaaaataaataacccaaaatcacaaaaaaaaaaaaaaaaa

SEQ ID NO: 238 - protein, 126 aa, Homo sapiens
MAEAGAGLSETVTETTVTVTTEPENRSLTIKLRKRKPEKKVEWTSDTVDNEHMGRRSSKCCCIYEKPRAFGESSTESDEEEEEGCGHTHCVRGHRKGRRRATLGPTPTTPPQPPDPSQPPPGPMQH

SEQ ID NO: 239 - DNA, 487 bp, Homo sapiens
  misc_feature (22)..(22): n is a, c, g, or t
  CDS (94)..(261)
ccgtgatgtggcgcctgcacantcctttccctttcggattcccgacgctgtggttgctgtaaggggtcctccctgcgccacacggccgtcgccatggtgaagctgagcaaagaggccaagcagagactacagcagctcttcaaggggagccagtttgccattcgctggggctttatccctcttgtgatttacctgggatttaagaggggtgcagatcccggaatgcctgaaccaactgttttgagcctactttggggataaaggattatttggtcttctggatttggaggcaatcagcggacagcatggaagatgtgtgctctggctcggataagagatgggacatcattcagtcactagttggatggcacaaggctcttcacagacgcatctgtagcagagtggaacttgtactaacttatgatagaatgtatcagaataaatgtttttaacagtgtaaaaaaaaaaaaaaaaaaaaaaaaaaaaa

SEQ ID NO: 240 - protein, 55 aa, Homo sapiens
MVKLSKEAKQRLQQLFKGSQFAIRWGFIPLVIYLGFKRGADPGMPEPTVLSLLWG

SEQ ID NO: 241 - DNA, 5390 bp, Homo sapiens
  CDS (96)..(3656)
gggggtgaaaggtaagggggagcgagagcgccagagagagaagatcggggggctgaaatccatcttcatcctaccgctccgcccgtgttggtggaatgagcgttgcatgtgtcttgaagagaaaagcagtgctttggcaggactctttcagcccccacctgaaacatcaccctcaagaaccagctaatcccaacatgcctgttgttttgacatctggaacagggtcgcaagcgcagccacaaccagctgcaaatcaggctcttgcagctgggactcactccagccctgtcccaggatctataggagttgcaggccgttcccaggacgacgctatggtggactacttctttcagaggcagcatggtgagcagcttgggggaggaggaagtggaggaggcggctataataatagcaaacatcgatggcctactggggataacattcatgcagaacatcaggtgcgttccatggatgaactgaatcatgattttcaagcacttgctctggagggaagagcgatgggagagcagctcttgccaggtaaaaagttttgggaaacagatgaatccagcaaagatggaccaaaaggaatattcctgggtgatcaatggcgagacagtgcctggggaacatcagatcattcagtttcccagccaatcatggtgcagagaagacctggtcagagtttccatgtgaacagtgaggtcaattctgtactgtccccacgatcggagagtgggggactaggcgttagcatggtggagtatgtgttgagctcatccccgggcgattcctgtctaagaaaaggaggatttggcccaagggatgcagacagtgatgaaaacgacaaaggtgaaaagaagaacaagggtacgtttgatggagataagctaggagatttgaaggaggagggtgatgtgatggacaagaccaatggtttaccagtgcagaatgggattgatgcagacgtcaaagattttagccgtacccctggtaattgccagaactctgctaatgaagtggatcttctgggtccaaaccagaatggttctgagggcttagcccagctgaccagcaccaatggtgccaagcctgtggaggatttctccaacatggagtcccagagtgtccccttggaccccatggaacatgtgggcatggagcctcttcagtttgattattcaggcacgcaggtacctgtggactcagcagcagcaactgtgggactttttgactacaattctcaacaacagctgttccaaagacctaatgcgcttgctgtccagcagttgacagctgctcagcagcagcagtatgcactggcagctgctcatcagccgcacatcggtttagctcccgctgcgtttgtccccaatccatacatcatcagcgctgctcccccagggacggacccctacacagctggattggctgcagcagcgacactaggcccagctgtggtccctcaccagtattatggagttactccctggggagtctaccctgccagtcttttccagcagcaagctgccgctgccgctgcagcaactaattcagctaatcaacagaccaccccacaggctcagcaaggacagcagcaggttctccgtggaggagccagccaacgtcctttgaccccaaaccagaaccagcagggacagcaaacggatccccttgtggcagctgcagcagtgaattctgcccttgcatttggacaaggtctggcagcaggcatgccaggttatccggtgttggctcctgctgcttactatgaccaaactggtgcccttgtagtgaatgcaggcgcgagaaatggtcttggagctcctgttcgacttgtagctcctgccccagtcatcattagttcctcagctgcacaagcagctgttgcagcagccgcagcttcagcaaatggagcagctggtggtcttgctggaacaacaaatggaccatttcgccctttaggaacacagcagcctcagccccagccccagcagcagcccaataacaacctggcatccagttctttctacggcaacaactctctgaacagcaattcacagagcagctccctcttctcccagggctctgcccagcctgccaacacatccttgggattcggaagtagcagttctctcggcgccaccctgggatccgcccttggagggtttggaacagcagttgcaaactccaacactggcagtggctcccgccgtgactccctgactggcagcagtgacctttataagaggacatcgagcagcttgacccccattggacacagtttttataacggccttagcttttcctcctctcctggacccgtgggcatgcctctccctagtcagggaccaggacattcacagacaccacctccttccctctcttcacatggatcctcttcaagcttaaacctgggaggactcacgaatggcagtggaagatacatctctgctgctccaggcgctgaagccaagtaccgcagtgcaagcagcgcctccagcctcttcagcccgagcagcactcttttctcttcctctcgtttgcgatatggaatgtctgatgtcatgccttctggcaggagcaggcttttggaagattttcgaaacaaccggtaccccaatttacaactgcgggagattgctggacatataatggaattttcccaagaccagcatgggtccagattcattcagctgaaactggagcgtgccacaccagctgagcgccagcttgtcttcaatgaaatcctccaggctgcctaccaactcatggtggatgtgtttggtaattacgtcattcagaagttctttgaatttggcagtcttgaacagaagctggctttggcagaacggattcgaggccacgtcctgtcattggcactacagatgtatggctgccgtgttatccagaaagctcttgagtttattccttcagaccagcagaatgagatggttcgggaactagatggccatgtcttgaagtgtgtgaaagatcagaatggcaatcacgtggttcagaaatgcattgaatgtgtacagccccagtctttgcaatttatcatcgatgcgtttaagggacaggtatttgccttatccacacatccttatggctgccgagtgattcagagaatcctggagcactgtctccctgaccagacactccctattttagaggagcttcaccagcacacagagcagcttgtacaggatcaatatggaaattatgtaatccaacatgtactggagcacggtcgtcctgaggataaaagcaaaattgtagcagaaatccgaggcaatgtacttgtattgagtcagcacaaatttgcaagcaatgttgtggagaagtgtgttactcacgcctcacgtacggagcgcgctgtgctcatcgatgaggtgtgcaccatgaacgacggtccccacagtgccttatacaccatgatgaaggaccagtatgccaactacgtggtccagaagatgattgacgtggcggagccaggccagcggaagatcgtcatgcataagatccggccccacatcgcaactcttcgtaagtacacctatggcaagcacattctggccaagctggagaagtactacatgaagaacggtgttgacttagggcccatctgtggcccccctaatggtatcatctgaggcagtgtcacccgctgttccctcattcccgctgacctcactggcccactggcaaatccaaccagcaaccagaaatgttctagtgtagagtctgagacgggcaagtggttgctccaggattactccctcctccaaaaaaggaatcaaatccacgagtggaaaagcctttgtaaatttaattttattacacataacatgtactattttttttaattgactaattgccctgctgttttactggtgtataggatacttgtacataggtaaccaatgtacatgggaggccacatattttgttcactgttgtatctatatttcacatgtggaaactttcagggtggttggtttaacaaaaaaaaaaagctttaaaaaaaaaagaaaaaaaggaaaaggtttttagctcatttgcctggccggcaagttttgcaaatagctcttccccacctcctcattttagtaaaaaacaaacaaaaacaaaaaaacctgagaagtttgaattgtagttaaatgaccccaaactggcatttaacactgtttataaaaaatatatatatatatatatatatataatgaaaaaggtttcagagttgctaaagcttcagtttgtgacattaagtttatgaaattctaaaaaatgccttttttggagactatattatgctgaagaaggctgttcgtgaggaggagatgcgagcacccagaacgtcttttgaggctgggcgggtgtgattgtttactgcctactggatttttttctattaacattgaaaggtaaaatctgattatttagcatgagaaaaaaaaatccaactctgcttttggtcttgcttctataaatatatagtgtatacttggtgtagactttgcatatatacaaatttgtagtattttcttgttttgatgtctaatctgtatctataatgtaccctagtagtcgaacatacttttgattgtacaattgtacatttgtatacctgtaatgtaaatgtggagaagtttgaatcaacataaacacgttttttggtaagaaaagagaattagccagccctgtgcattcagtgtatattctcaccttttatggtcgtagcatatagtgttgtatattgtaaattgtaatttcaaccagaagtaaatttttttcttttgaaggaataaatgttctttatacagcctagttaatgtttaaaaagaaaaaaatagcttggttttatttgtcatctagtctcaagtatagcgagattctttctaaatgttattcaagattgagttctcactagtgtttttttaatcctaaaaaagtaatgttttgattttgtgacagtcaaaaggacgtgcaaaagtctagccttgcccgagctttccttacaatcagagcccctctcaccttgtaaagtgtgaatcgcccttcccttttgtacagaagatgaactgtattttgcattttgtctacttgtaagtgaatgtaacatactgtcaattttccttgtttgaatatagaattgtaacactacacggtgtacatttccagagccttgtgtatatttccaatgaacttttttgcaagcacacttgtaaccatatgtgtataattaacaaacctgtgtatgcttatgcctgggcaactattttttgtaactcttgtgtagattgtctctaaacaatgtgtgatctttattttgaaaaatacagaactttggaatctgaaaaaaaaaaaaaaaaaaaaaaaaaaaaaaa

SEQ ID NO: 242 - protein, 1186 aa, Homo sapiens
MSVACVLKRKAVLWQDSFSPHLKHHPQEPANPNMPVVLTSGTGSQAQPQPAANQALAAGTHSSPVPGSIGVAGRSQDDAMVDYFFQRQHGEQLGGGGSGGGGYNNSKHRWPTGDNIHAEHQVRSMDELNHDFQALALEGRAMGEQLLPGKKFWETDESSKDGPKGIFLGDQWRDSAWGTSDHSVSQPIMVQRRPGQSFHVNSEVNSVLSPRSESGGLGVSMVEYVLSSSPGDSCLRKGGFGPRDADSDENDKGEKKNKGTFDGDKLGDLKEEGDVMDKTNGLPVQNGIDADVKDFSRTPGNCQNSANEVDLLGPNQNGSEGLAQLTSTNGAKPVEDFSNMESQSVPLDPMEHVGMEPLQFDYSGTQVPVDSAAATVGLFDYNSQQQLFQRPNALAVQQLTAAQQQQYALAAAHQPHIGLAPAAFVPNPYIISAAPPGTDPYTAGLAAAATLGPAVVPHQYYGVTPWGVYPASLFQQQAAAAAAATNSANQQTTPQAQQGQQQVLRGGASQRPLTPNQNQQGQQTDPLVAAAAVNSALAFGQGLAAGMPGYPVLAPAAYYDQTGALVVNAGARNGLGAPVRLVAPAPVIISSSAAQAAVAAAAASANGAAGGLAGTTNGPFRPLGTQQPQPQPQQQPNNNLASSSFYGNNSLNSNSQSSSLFSQGSAQPANTSLGFGSSSSLGATLGSALGGFGTAVANSNTGSGSRRDSLTGSSDLYKRTSSSLTPIGHSFYNGLSFSSSPGPVGMPLPSQGPGHSQTPPPSLSSHGSSSSLNLGGLTNGSGRYISAAPGAEAKYRSASSASSLFSPSSTLFSSSRLRYGMSDVMPSGRSRLLEDFRNNRYPNLQLREIAGHIMEFSQDQHGSRFIQLKLERATPAERQLVFNEILQAAYQLMVDVFGNYVIQKFFEFGSLEQKLALAERIRGHVLSLALQMYGCRVIQKALEFIPSDQQNEMVRELDGHVLKCVKDQNGNHVVQKCIECVQPQSLQFIIDAFKGQVFALSTHPYGCRVIQRILEHCLPDQTLPILEELHQHTEQLVQDQYGNYVIQHVLEHGRPEDKSKIVAEIRGNVLVLSQHKFASNVVEKCVTHASRTERAVLIDEVCTMNDGPHSALYTMMKDQYANYVVQKMIDVAEPGQRKIVMHKIRPHIATLRKYTYGKHILAKLEKYYMKNGVDLGPICGPPNGII

SEQ ID NO: 243 - DNA, 12227 bp, Homo sapiens
  CDS (205)..(11199)
tgagctgcgaggcccgagagtcagaacctgggggagagggatggtctctgcacgggggggagccggaggagccgccgccgctgccgacgccaccgccgcagccgccgccgccgccgccccggcacccgcctcccggcgctgacggtctcgtacgaagccggcgagggggagccagcagcggcggtcgccggcacgccgcccagcatggtccgggaaaccaggcatctctgggtgggcaacttacccgagaacgtgcgggaagagaagatcatcgagcatttcaaacgatatggccgcgtggaaagtgtcaaaattcttcccaagaggggatctgaaggaggagtggctgcctttgtggattttgtggacatcaaaagtgcacagaaagctcacaactcggtcaacaaaatgggtgacagagacctacgcacggattataatgaaccaggcaccatcccgagtgctgctcggggattggatgatacagtttccatagcatctcgtagtagagaggtttctgggttcagaggaggtggtggagggcctgcttatggtcccccaccgtcacttcatgcacgagaaggacgttatgagcggagacttgatggggcttcagataacagggagcgtgcttatgaacatagtgcctatggacaccatgaacgggggacgggaggatttgatcggacaagacattacgatcaggattactatagagatcctcgagagcggactttacaacatgggctctattacgcttctcggagtcgaagtccaaatcgctttgatgctcatgacccccgatatgaacctagggctcgcgagcagtttacactgcccagtgtggtacacagggatatctacagggatgatattacccgggaggtacgaggcagaaggccagagcggaattaccagcacagcaggagtcggtcaccacattcatcccagtctagaaatcagtctcctcagagactggctagccaagcatctagacccacaaggtcccctagcggcagcggctctagaagtagatcctccagtagtgattcaatcagcagcagcagtagtaccagcagtgacagcagtgattccagcagtagttcaagtgatgattctccagctcgatcagttcagtctgcagcagtccctgcacccacttcccagttgctttcatctctggaaaaagatgagccccgtaaaagttttggcatcaaggtccagaatcttccagtacgctctacagatacaagccttaaagatggccttttccatgaatttaagaaatttggaaaagtaacttcagtgcagatacatggaacttcagaagagaggtatggtctggtattctttcggcagcaagaggaccaagaaaaagccttgactgcatcaaaaggaaaacttttctttggcatgcagattgaagtaacagcatggataggtccagaaacagaaagtgaaaatgaatttcgccccttggatgaaaggatagatgaatttcaccccaaagcaacaagaactctctttattggcaaccttgaaaaaaccactacttaccatgaccttcgcaacatcttccagcgctttggagaaattgtggatattgacattaagaaagtaaatggagttcctcagtatgcgtttctgcaatactgtgatattgctagcgtttgtaaagctattaagaagatggatggggaatatcttggaaataatcgcctcaagctgggttttggaaagagcatgcctacaaactgcgtgtggctagatgggctttcttcgaatgtgtcagatcagtatttaacacgacatttctgccgatatgggcctgtggtaaaggtggtgtttgaccgcttaaaaggcatggccctggttctctacaatgaaattgaatatgcacaagcagctgtaaaagagaccaaagggaggaaaatcggtgggaataaaattaaggtggattttgcaaatcgggaaagtcagctggctttttatcactgcatggagaaatctggtcaagacatcagagacttttatgaaatgttagccgaaagaagagaggaacgaagggcatcctacgactataaccaagatcgtacatattatgagagtgttcgaactccaggcacttatcctgaggattccaggcgggactatccagctcgagggagagagttttattcagaatgggaaacttaccaaggagactactatgaatcacgatactacgatgatcctcgggaatacagggattacaggaatgatccttatgaacaagatattagggaatatagttacaggcaaagggaacgagaaagagaacgtgaaagatttgagtctgaccgggacagagaccatgagaggaggccgattgaacgaagtcaaagtcctgttcacttgcgacgtccacagagtcctggagcgtctccctctcaggcagagaggttgccgagtgattctgagaggaggctttacagccgatcctcagaccggagtggaagctgtagctcactctcccctccaagatatgagaaactggacaagtctcgtttggagcgctatacaaaaaatgaaaagacagataaagaacgaacttttgatccggagagagtggagagagagagacgcttaatacggaaggaaaaagtggaaaaggacaaaactgacaagcagaaacgcaaaggaaaggttcactcccctagttctcagtcttcagaaacggaccaagaaaatgagcgagagcaaagccctgaaaagcccaggagttgtaataaactgagcagagagaaagctgacaaagagggaatagcgaaaaaccgcctggaactcatgccttgcgtggttttgactcgagtgaaagagaaagagggaaaggtcattgaccacactcctgtggaaaagttgaaagccaagcttgataatgacactgtcaaatcttctgccctggaccagaaacttcaggtctctcagacggagcctgcaaaatctgacttgtctaaactggaatcagttagaatgaaagtaccaaaggaaaaggggctttcaagccatgttgaagtggtggagaaggaaggcaggcttaaagccaggaagcacctcaagcctgagcagcctgcagatggggtaagtgctgtggatctggagaagctggaagccaggaaaaggcgctttgcagattccaatttaaaagcagaaaagcaaaaaccagaggtcaagaaaagcagtccagagatggaggatgctcgcgtgctttcaaaaaagcagcctgacgtgtcctctagagaggtcattctgctgagggaaggagaggctgaaagaaagcctgtgaggaaagaaattcttaaaagagaatctaaaaaaatcaaactggacagacttaatactgttgccagccccaaagactgtcaggagcttgccagtatttctgttgggtctggctcaaggcccagctcagacctacaagcaagactgggagaactagcaggtgaatctgtggaaaatcaagaagtccaatcaaaaaagcccattccctcaaaaccacagctcaaacagctgcaggtattagatgatcaaggaccagagagagaagacgttaggaaaaactattgcagtcttcgtgatgaaacacctgaacgtaaatcaggccaagagaaatcacattcagtaaatactgaagaaaaaattggcattgacatcgatcacacgcagagttaccgaaaacaaatggaacagagtcgtaggaaacagcagatggaaatggaaatagccaagtctgagaagtttggcagtcctaaaaaagatgtagatgaatatgaaagacgtagcctcgttcacgaggtaggcaaaccccctcaagatgtcactgatgactctcctcctagcaaaaagaaaaggatggatcatgtcgattttgatatctgcaccaagcgagaacggaattacagaagttcacgccaaatcagcgaagattctgaaaggactggtggttctcccagtgtccgacatggttccttccatgaagatgaggatcccataggctcccctaggctactgtcagtaaaagggtctcctaaagtagatgaaaaagtcctcccctattctaacataacagtcagggaagagtctttaaaatttaatccttatgattctagcaggagagaacagatggcagatatggccaaaataaaactatctgtcttgaattctgaagatgaactaaatcgttgggactctcagatgaaacaggatgctggcagatttgatgtgagtttcccaaacagcataattaagagagatagccttcgaaaaaggtctgtacgagatctggaacctggtgaggtgccttctgattctgacgaagatggtgaacacaaatcccactcacccagagcctctgcattatatgaaagttctcgattgtcttttttattgagggacagagaagacaagctacgtgagcgagatgaaagactctctagttctttagaaaggaacaaattttactcttttgcattggataagacaatcacaccagacactaaagctttgcttgaaagagctaaatccctctcttcatctcgtgaagaaaattggtcttttcttgattgggactcccgatttgcaaattttcgaaacaacaaagataaagaaaaggttgactctgctccaagacctattccatcctggtacatgaaaaagaagaaaattaggactgattcagaagggaaaatggatgataagaaagaggaccataaagaagaagagcaagagaggcaggaattgtttgcttctcgttttttacacagctcaatctttgaacaagattccaagcgattgcagcatctagagagaaaagaggaagattctgacttcatttctggtaggatctatgggaagcagacatctgagggagcaaacagcacaactgattccattcaagaaccagtagttctgttccatagcagatttatggagctcacacggatgcaacagaaagaaaaagaaaaagaccagaaacccaaagaggttgagaaacaggaagatacagagaatcatcccaagaccccagaatctgctcctgagaataaagattcagaactgaaaactccaccttccgttgggcctccaagtgtcacagtcgtaactctagaatcagccccatcagcactagagaagaccactggtgacaaaacggtagaggcgcctttggtaacagaagagaagactgtggagccagctaccgtctcagaagaagcaaagcctgcatctgaacctgctcctgcccctgtggaacagctggaacaagtagacctgcccccaggagcagaccccgataaagaagctgccatgatgcctgcgggtgttgaggaaggttcatcaggtgaccagccgccttatctggatgccaagcctccaactcccggggcctcgttttcccaggcagagagcaacgtagatccagagcctgacagtacccagccactttcaaaaccagctcagaagtctgaggaagccaatgagccaaaggccgaaaagccagacgccactgcagatgctgagcctgatgcaaaccagaaagccgaagctgctcctgagtctcagcccccagcttctgaagatttagaggttgatcctccagttgctgcaaaggataaaaagccaaacaaaagcaagcgttcaaagacccctgttcaggcagctgcagtgagtatcgtggagaagcccgtcacaaggaagagtgagaggatagaccgggaaaaactcaagcggtccaattctcctcggggagaagcacagaagcttttggaattgaagatggaggcagagaagattacaaggactgcttctaaaaactctgctgcagaccttgaacatcccgaaccaagtttgcctctcagccgaacaaggcgccggaatgtaaggagcgtctatgcaaccatgggtgaccatgaaaaccgctctcctgtcaaagagcccgttgagcaaccaagagtgaccagaaagagattggagcgagagcttcaggaggctgcagcggttcccaccacccctcggaggggaaggcctccaaagacacgccggcgagccgatgaagaggaggagaacgaggccaaggaacctgcagaaacactcaagccacctgagggatggcggtcgccaaggtcccagaaaactgcagctggtggtggaccccaagggaaaaagggaaaaaatgaaccgaaggtggatgctacacgtcctgaggccaccactgaggtgggcccccaaataggcgtgaaagagagctccatggaacccaaggctgctgaggaggaggcagggagtgaacagaaacgtgacagaaaagatgctggcacagacaaaaacccccctgaaaccgcccctgttgaagttgtagagaaaaaaccggcccctgaaaaaaactccaaatcaaagagaggaagatctcgaaactccaggttagcagtggacaaatctgcaagtctgaaaaatgtggatgctgctgtcagtcccaggggggctgcagcacaggcaggggagagggaatctggggtggtggcagtctcccctgagaaaagtgagagtccccaaaaggaggatggtttatcatcccagttgaaaagtgatccagttgatccagacaaggaaccagagaaagaagacgtgtctgcctctgggccgtccccagaagccacccagttagccaagcagatggagctggagcaggccgtggaacacatcgcaaagctcgctgaggcctctgcctctgctgcctataaggcagatgcaccagagggccttgccccagaggacagggacaagcctgcacaccaagcaagtgaaacagagctggctgcggccatcggctccatcatcaatgacatttctggggagccagaaaacttcccagcacctccaccttatcctggagaatcccagacagatctgcaaccccccgcaggtgcacaggcgctgcagccttctgaggaaggaatggagacagatgaggctgtatctggcatcctggaaactgaggctgctacagaatcttctaggcctccagtcaatgctcctgacccctcagccggcccaacagataccaaggaagccagaggaaatagcagtgaaacctcacactcagtgccagaagccaaagggtctaaagaagtggaagtcactcttgttcggaaagacaaagggcgccagaaaacaacccgatcacgccgcaagcgaaacacaaacaagaaagtggtggctcctgtagagagccatgtccctgaatccaaccaagctcaaggtgagagtcctgctgcaaatgaggggacaacagtacagcaccccgaagccccacaggaagaaaagcagagtgagaaaccccattccactcctcctcagtcatgtacttctgacctaagcaagattccctccacagagaattcgtcccaagaaatcagtgttgaggaaaggactccaaccaaagcatctgtgcccccagaccttcccccacctccccagccagcaccggtggatgaggagcctcaagccaggttcagggtgcattccatcattgaaagtgacccggtgaccccacccagcgatccaagcatccccatacccacactgccttctgtaactgcagcaaagctctcacctcctgtcgcctctggggggatcccacaccagagcccccctactaaggtgacagagtggatcacaaggcaggaggagccacgggctcagtctactccatctccagctcttcccccagacacaaaggcctctgatgttgacaccagctccagcaccctgaggaagattctcatggaccccaagtatgtgtctgccacaagtgtcacttccacaagtgtcaccacagccattgcagagcctgtcagtgctgccccttgcctacatgaggccccgcccccgccagttgactctaaaaagcctttagaagaaaaaacagcacctccagtgacaaacaactctgagatacaagcctcggaggtgctggtagctgctgacaaggaaaaggtggctccagtcattgctcccaaaattacctctgttattagccggatgcctgtcagcattgacctggaaaattcacagaagataaccttggcaaaaccagctcctcaaaccctcactggtctggtgagcgcactcactggcctggtgaacgtctccctggtcccggtgaatgccctgaaaggccccgtgaagggctcagtgaccacactgaaaagtttggtgagcacccctgctgggcccgtgaacgtcctgaaagggcctgtgaatgttcttacggggccagtgaatgttctcaccactccagtgaacgccacggtgggcacagtgaatgccgccccaggcacagtcaatgccgctgcgagtgcagtgaatgccacagcaagtgcagtgaccgtcacagcgggtgcggttactgctgcatctggtggtgtaacggccacaacaggcacggtgacaatggcaggggcagtgattgcgccgtcaacaaagtgcaaacagagagcgagtgctaatgaaaacagtcggttccacccagggtccatgcctgtgatcgacgatcgtccggcagacgcgggctcaggggcggggctgcgtgtgaacacttctgaaggggttgtgctcctgagttactcagggcagaagaccgaaggcccacagcggatcagcgccaagatcagccagatccccccggccagtgcaatggacattgaatttcagcagtcagtgtccaagtcccaggtcaaacctgattctgtcacagcatcgcagcctccatccaaaggccctcaagctcctgcaggctatgcgaacgtggccacccattccacgttggtactgaccgcccagacatataatgcctctcctgtgatttcgtctgtgaaggccgataggccatccttggagaagcccgagcccattcacctctcggtgtccacgcctgtcacccagggaggcacagtgaaggttctcacccaggggatcaacacaccccctgtgctggttcacaaccagctggtcctcaccccaagcattgtcaccacaaacaagaagcttgctgaccccgtcacccttaaaatcgagaccaaggtccttcagccggccaacctggggtccacgctcacgccccaccaccctcctgctctgcccagcaaactgcctacagaagtcaaccatgtcccctcggggcccagcatcccagcagatcgaactgtctcccatttggcagctgcaaagctagatgctcattctcctcgaccaagtggacccgggccatcctcattcccaagggcaagccaccccagcagtactgcatctacggcgctctccaccaacgccacagtcatgctggctgcaggcatcccagtgccccagttcatctccagcatccacccagagcagtctgtcatcatgccaccccacagcatcacccagactgtgtccctgagccacctctcccagggcgaggtgagaatgaacactcccacgctgcccagtatcacctacagcatccggccagaagcgcttcactctcctcgggctccgctgcagccccagcaaatagaggtcagggccccacagcgtgccagcaccccgcagccagccccagctggtgtgcctgcactggcctcccagcaccctcccgaggaggaagtgcattatcaccttcctgtcgctcgagccacagcccctgtgcagtcagaggtactagtcatgcagtctgagtaccgactgcacccctatactgtgccacgggatgtgaggatcatggtgcatccacatgtgacggcagtcagcgagcagcccagggccgcggatggggtggtgaaggtgccaccagccagcaaggcccctcagcagccagggaaggaagctgccaagacaccagatgccaaagctgcccccacccccacccctgcccccgtccctgtccctgtcccccttcctgcccctgctcctgcccctcatggtgaggcccgtatcctcacagttacccccagtaaccaactccaggggctgcctctgacccctcctgtggtggtgacccatggggtgcagattgtgcactccagcggggagctgtttcaagagtaccggtacggcgacatccgcacctaccaccccccggcccagctcacacacactcagtttcccgccgcttcctctgttggcctgccttcccggaccaagacagctgctcagggccctcctcctgaaggtgagcccctgcagcctcctcagcctgtgcagtccacacagcctgcccagcctgcaccaccctgcccgccctcccagctcggtcagcccggccagccaccaagcagcaagatgcctcaagtgtcccaggaggcaaaggggacccagacgggagtagagcagcctcgcctcccagctggacctgcaaacaggccacctgagcctcacacccaggttcagagggcacaagcagaaacaggcccgacttccttcccctcccctgtgtctgtctccatgaagcctgaccttccagtctctcttcccactcagactgccccaaaacagccgttgtttgtcccaacaacctctggccccagcaccccaccaggactggttctgccacacactgaattccagccagcccccaaacaagattcctctccacacctgacttcccagagacccgtggatatggttcaacttctgaagaagtaccccatcgtgtggcagggcctgctggccctcaagaatgacacagctgctgtgcagctccacttcgtctctggcaacaacgtcctggcccatcggtccctgcccctttctgaaggagggcccccactaaggatcgcccagaggatgcggctggaggcaacgcagctggaaggggttgcccgaaggatgacggtggagacagattactgtctgctgctggctctgccctgtggccgtgaccaagaggatgttgtgagccagaccgagtccctcaaggctgccttcatcacttacctgcaggccaagcaggcggcagggatcatcaacgttcccaaccctggctccaatcagcctgcctacgtgctgcagatcttcccgccctgtgagttctctgagagtcacctgtcccgcctggcccctgacctccttgccagcatctccaacatctctccccacctcatgattgtcattgcctccgtgtgagccactgagtggttatcacctcagtgaatcttcccagggctctgcagtaaaaacaaaggacaacccagccaagcagaggaagaagctgccgaaggggacagactccactgccagacggccagccgtttgctgtcctgccgcccggctcagtcggccagacttcctctaggagtggtgctgctaccttgtatgtttacataatgctttagcccaaggacacatcaccaacccatggactcgcagacaccggggctgggtttctctttcctctttttggagaaaaggaacagggcagtggaatgaaaattttttgtttgtttgtttttaagaaacaagaaaacagaactgcctttgcactaaattagtgacttggacttttgcccagtgaagacaggctgtgacactctggatgtcttggtgtgtgtagacacacattgcagactcttaacgcaggaaggacttcaaacttctgctgagaccttggggtcaaggaacatttcattggttttttttgtccacccccatctcccttgctcatttggatgcgtcaccttaattctcctgctgccaccgtctttgattcaccgggatgtacagtttacagttgaagagcaaacagaaaggttttctcttggtgggatatgcagaacttgggatgtgtgtatatataaatatataatatatataaatatatataatactgacttaaaaaatcaaatcccccgacatacgttttttttaatctgtgccaaaaatgtgttttcagaggaaatcttattttcatattcagactttgtattgcccactcatttgtataagtgcgcttcggtacagcacgggtcctgctcccgcgatgtggaagtgtcacacggcacctgtacaaaaagactggctaacccctcttcctattaccttgatctcttcccccaacttcctaacacttattaatttatgaaactgtttttctcagcgcagttttgttttgtgtgtccattggattacaaactttattaaaaaatataaaacac

SEQ ID NO: 244 - protein, 3664 aa, Homo sapiens
MVRETRHLWVGNLPENVREEKIIEHFKRYGRVESVKILPKRGSEGGVAAFVDFVDIKSAQKAHNSVNKMGDRDLRTDYNEPGTIPSAARGLDDTVSIASRSREVSGFRGGGGGPAYGPPPSLHAREGRYERRLDGASDNRERAYEHSAYGHHERGTGGFDRTRHYDQDYYRDPRERTLQHGLYYASRSRSPNRFDAHDPRYEPRAREQFTLPSVVHRDIYRDDITREVRGRRPERNYQHSRSRSPHSSQSRNQSPQRLASQASRPTRSPSGSGSRSRSSSSDSISSSSSTSSDSSDSSSSSSDDSPARSVQSAAVPAPTSQLLSSLEKDEPRKSFGIKVQNLPVRSTDTSLKDGLFHEFKKFGKVTSVQIHGTSEERYGLVFFRQQEDQEKALTASKGKLFFGMQIEVTAWIGPETESENEFRPLDERIDEFHPKATRTLFIGNLEKTTTYHDLRNIFQRFGEIVDIDIKKVNGVPQYAFLQYCDIASVCKAIKKMDGEYLGNNRLKLGFGKSMPTNCVWLDGLSSNVSDQYLTRHFCRYGPVVKVVFDRLKGMALVLYNEIEYAQAAVKETKGRKIGGNKIKVDFANRESQLAFYHCMEKSGQDIRDFYEMLAERREERRASYDYNQDRTYYESVRTPGTYPEDSRRDYPARGREFYSEWETYQGDYYESRYYDDPREYRDYRNDPYEQDIREYSYRQRERERERERFESDRDRDHERRPIERSQSPVHLRRPQSPGASPSQAERLPSDSERRLYSRSSDRSGSCSSLSPPRYEKLDKSRLERYTKNEKTDKERTFDPERVERERRLIRKEKVEKDKTDKQKRKGKVHSPSSQSSETDQENEREQSPEKPRSCNKLSREKADKEGIAKNRLELMPCVVLTRVKEKEGKVIDHTPVEKLKAKLDNDTVKSSALDQKLQVSQTEPAKSDLSKLESVRMKVPKEKGLSSHVEVVEKEGRLKARKHLKPEQPADGVSAVDLEKLEARKRRFADSNLKAEKQKPEVKKSSPEMEDARVLSKKQPDVSSREVILLREGEAERKPVRKEILKRESKKIKLDRLNTVASPKDCQELASISVGSGSRPSSDLQARLGELAGESVENQEVQSKKPIPSKPQLKQLQVLDDQGPEREDVRKNYCSLRDETPERKSGQEKSHSVNTEEKIGIDIDHTQSYRKQMEQSRRKQQMEMEIAKSEKFGSPKKDVDEYERRSLVHEVGKPPQDVTDDSPPSKKKRMDHVDFDICTKRERNYRSSRQISEDSERTGGSPSVRHGSFHEDEDPIGSPRLLSVKGSPKVDEKVLPYSNITVREESLKFNPYDSSRREQMADMAKIKLSVLNSEDELNRWDSQMKQDAGRFDVSFPNSIIKRDSLRKRSVRDLEPGEVPSDSDEDGEHKSHSPRASALYESSRLSFLLRDREDKLRERDERLSSSLERNKFYSFALDKTITPDTKALLERAKSLSSSREENWSFLDWDSRFANFRNNKDKEKVDSAPRPIPSWYMKKKKIRTDSEGKMDDKKEDHKEEEQERQELFASRFLHSSIFEQDSKRLQHLERKEEDSDFISGRIYGKQTSEGANSTTDSIQEPVVLFHSRFMELTRMQQKEKEKDQKPKEVEKQEDTENHPKTPESAPENKDSELKTPPSVGPPSVTVVTLESAPSALEKTTGDKTVEAPLVTEEKTVEPATVSEEAKPASEPAPAPVEQLEQVDLPPGADPDKEAAMMPAGVEEGSSGDQPPYLDAKPPTPGASFSQAESNVDPEPDSTQPLSKPAQKSEEANEPKAEKPDATADAEPDANQKAEAAPESQPPASEDLEVDPPVAAKDKKPNKSKRSKTPVQAAAVSIVEKPVTRKSERIDREKLKRSNSPRGEAQKLLELKMEAEKITRTASKNSAADLEHPEPSLPLSRTRRRNVRSVYATMGDHENRSPVKEPVEQPRVTRKRLERELQEAAAVPTTPRRGRPPKTRRRADEEEENEAKEPAETLKPPEGWRSPRSQKTAAGGGPQGKKGKNEPKVDATRPEATTEVGPQIGVKESSMEPKAAEEEAGSEQKRDRKDAGTDKNPPETAPVEVVEKKPAPEKNSKSKRGRSRNSRLAVDKSASLKNVDAAVSPRGAAAQAGERESGVVAVSPEKSESPQKEDGLSSQLKSDPVDPDKEPEKEDVSASGPSPEATQLAKQMELEQAVEHIAKLAEASASAAYKADAPEGLAPEDRDKPAHQASETELAAAIGSIINDISGEPENFPAPPPYPGESQTDLQPPAGAQALQPSEEGMETDEAVSGILETEAATESSRPPVNAPDPSAGPTDTKEARGNSSETSHSVPEAKGSKEVEVTLVRKDKGRQKTTRSRRKRNTNKKVVAPVESHVPESNQAQGESPAANEGTTVQHPEAPQEEKQSEKPHSTPPQSCTSDLSKIPSTENSSQEISVEERTPTKASVPPDLPPPPQPAPVDEEPQARFRVHSIIESDPVTPPSDPSIPIPTLPSVTAAKLSPPVASGGIPHQSPPTKVTEWITRQEEPRAQSTPSPALPPDTKASDVDTSSSTLRKILMDPKYVSATSVTSTSVTTAIAEPVSAAPCLHEAPPPPVDSKKPLEEKTAPPVTNNSEIQASEVLVAADKEKVAPVIAPKITSVISRMPVSIDLENSQKITLAKPAPQTLTGLVSALTGLVNVSLVPVNALKGPVKGSVTTLKSLVSTPAGPVNVLKGPVNVLTGPVNVLTTPVNATVGTVNAAPGTVNAAASAVNATASAVTVTAGAVTAASGGVTATTGTVTMAGAVIAPSTKCKQRASANENSRFHPGSMPVIDDRPADAGSGAGLRVNTSEGVVLLSYSGQKTEGPQRISAKISQIPPASAMDIEFQQSVSKSQVKPDSVTASQPPSKGPQAPAGYANVATHSTLVLTAQTYNASPVISSVKADRPSLEKPEPIHLSVSTPVTQGGTVKVLTQGINTPPVLVHNQLVLTPSIVTTNKKLADPVTLKIETKVLQPANLGSTLTPHHPPALPSKLPTEVNHVPSGPSIPADRTVSHLAAAKLDAHSPRPSGPGPSSFPRASHPSSTASTALSTNATVMLAAGIPVPQFISSIHPEQSVIMPPHSITQTVSLSHLSQGEVRMNTPTLPSITYSIRPEALHSPRAPLQPQQIEVRAPQRASTPQPAPAGVPALASQHPPEEEVHYHLPVARATAPVQSEVLVMQSEYRLHPYTVPRDVRIMVHPHVTAVSEQPRAADGVVKVPPASKAPQQPGKEAAKTPDAKAAPTPTPAPVPVPVPLPAPAPAPHGEARILTVTPSNQLQGLPLTPPVVVTHGVQIVHSSGELFQEYRYGDIRTYHPPAQLTHTQFPAASSVGLPSRTKTAAQGPPPEGEPLQPPQPVQSTQPAQPAPPCPPSQLGQPGQPPSSKMPQVSQEAKGTQTGVEQPRLPAGPANRPPEPHTQVQRAQAETGPTSFPSPVSVSMKPDLPVSLPTQTAPKQPLFVPTTSGPSTPPGLVLPHTEFQPAPKQDSSPHLTSQRPVDMVQLLKKYPIVWQGLLALKNDTAAVQLHFVSGNNVLAHRSLPLSEGGPPLRIAQRMRLEATQLEGVARRMTVETDYCLLLALPCGRDQEDVVSQTESLKAAFITYLQAKQAAGIINVPNPGSNQPAYVLQIFPPCEFSESHLSRLAPDLLASISNISPHLMIVIASV

SEQ ID NO: 245 - DNA, 7350 bp, Homo sapiens
  CDS (639)..(3047)
tgtgcgtcgcgctctcgccctcctcttcccgctgcagtgtctatggagcgaggctacgtttcattgccgccctggcttaacccttccggcgcctaaaaggacggccggccggccggtcccttgcaccaggaagaagtcttagcagccagcgggccctggtcaggaaactctaaggtacaaggaaaacagttgaggaaggagccagagcgctccggtttggtcctcgggcttcgctggggcggggcgcaggcgttggctttaagaaaggggaggggacagtgcaatccgggttgcccgcggattcggccaaggaatcttccgctcgctccggagcgaggagcctgtaaagaggctgttcccagctccagctctaacctcgcctacaccttgggcgggcccaatgtcacgtttgcaattgctcaggaaggatccggcccgtctccggaggcaagtcgggctgcggtttttgctgcttatctgggaaggcgatgcctaagggacatgctgcttgctaggcagcaccctgccgggatccgactgcgatagttagctctccctggccctgaagccatcgccggggcgcctgttctctgtccggaccagccagcgctcctcaggagtctcactgaaacagaaccatgggtcatcccccgctggagttcagcgactgctacctggacagccccgatttccgcgagaggctcaagtgttatgagcaggaactggagaggaccaacaaattcatcaaagacgtaatcaaagacggcaacgcgcttatcagcgctatgagaaattattcttctgctgttcagaaattttcccagacgctgcagtcatttcagtttgatttcattggagacactctgactgatgatgaaattaacatcgctgaatccttcaaggaatttgctgaattgctcaacgaggtagaaaatgagaggatgatgatggtacacaatgctagtgatttgctgattaaacccttggaaaatttccggaaggaacaaataggcttcaccaaggagcggaaaaagaaatttgaaaaggatggtgagaggttttattctttactggatcggcacttacacctgtcttcaaaaaagaaagaatctcagttacaagaggcagacctacaggtggacaaggagaggcacaattttttcgagtcctctcttgattatgtttatcaaatccaggaagttcaggagtccaagaagttcaatattgtggagcctgtcttggcctttcttcatagtctgttcatttctaacagcctgactgtggagctcacacaggatttcctcccatacaaacaacagctccaactcagtttacagaatacaagaaatcatttctccagtacccgggaagagatggaagaacttaagaaaaggatgaaagaagctccccagacatgcaaacttccaggacagccaactattgaaggctatctctatacacaagagaaatgggctttaggaatatcctgggtgaaatactattgccagtatgagaaagagaccaaaacactgaccatgacgcctatggagcagaagccaggtgctaagcaggggcccttggacttaacactgaagtactgtgtgagaaggaagacggagtctatcgacaagaggttctgttttgacatagaaactaatgaaaggccaggaaccatcactctgcaggccctttcagaagctaacagaaggctatggatggaagccatggatgggaaagaacctatctaccacagccctataacaaaacagcaagaaatggagctaaatgaagtgggcttcaagtttgtcaggaagtgcatcaatattattgagaccaaagggatcaagacagaagggttgtaccgcactgtgggcagcaatattcaggttcagaagctgctgaatgccttttttgatcctaaatgcccaggagatgttgattttcataatagtgactgggacattaagacaatcaccagctccttgaaattctacctcaggaatctttctgaacctgtcatgacctatagacttcacaaagagctggtctctgctgccaagtctgacaacctggattaccgcctaggagctattcactccctggtatataagctaccagaaaagaaccgagagatgctggaacttctgataagacacttggtcaatgtgtgtgagcacagcaaagagaatcttatgaccccctccaacatgggagtaatctttgggcccaccctgatgagagctcaggaggacactgtggccgccatgatgaacatcaaattccagaacatagtggtggaaatactaatcgagcactttggcaagatctatttaggtccacctgaggaaagcgctgcaccgccagtgcctccgcctcgggtgacagcaagaaggcacaaaccaatcacgatttcaaagcgcttgctgcgagaaaggacggttttctatacttcttccctggatgaaagcgaagatgaaatccaacatcaaacaccgaatggtactatcaccagcagcatagaaccccccaagccaccacaacaccccaaactacctattcagaggagtggggaaactgatcctgggaggaagtccccaagcaggcctattttggatggcaagttggagccctgcccagaggtggacgtggggaagttggtgtctaggctgcaggatggagggaccaagatcaccccaaaggccaccaatggacccatgccaggctctgggcccaccaagaccccctctttccacataaagagaccagctccccggcccctggcccaccacaaggagggggatgctgacagtttcagcaaagtgcggcctccaggagaaaagccaaccatcatccgccccccagtgaggcccccagatcctccctgccgggcagctactccccaaaagccagaaccaaagccagatattgtggctggcaatgcgggggaaatcacatcatctgtggtggcttccaggaccaggttttttgaaacagcttcccggaaaacaggaagttctcaaggcagacttcctggagatgaaagttgaggctacaggttttaaaagccttggcctcagaggaccctttccaggttctgaaagagtctttcttcttcaaacctttgtgtgcggagtcattttgtgttgaagagcagctccttcctagccttgcactttcagactctctctgggaggccataaaataaggagcatatgtcctagacaggtgtttatatctcctttgtattctgtcttcatcccctcagaaggtctgttttgagttcctataacactgtgaagagctggactccctcaagccagactctgccaaaaccaagatatccacttacctgagttgaagaggggagctcagttttcaactcttccctgaacttcctgcttcctcagagggccattgaactctgagagatttggggctaaagactgatctcaggggtcttaccttgaactgaaggccacttgagttggggccattgcttaccttggttggaagggaatagaaatgtttgctgaacattggagaatctcaacatgtctcctactgaggatatggacactggtgccatgtcagcgctctggtgctgcagtatgttgccaagagcccgtctgctcctgcgaggctatgagtgggatgagtgatgcccccacagcacctccatgtggacttaggaaggtggccttcctgctgttacatgcagccacttaggacaaatctgcaaagcatgttttgcatgtaaaagcctaggtctatttggattattctttctccttttttttgacagcttcctgtcaagcaatcaagaaacaaacaaaagctgaacacatttccttttaaaaaaaggagactgtgtttggtcctgtaggagttctattttggggtcaaatgctagaaaaattgttaaggtggattgaggccaggcagctgtcactgctgcttcatgtttgccttctgcacataaactcttttatctcctgaaaaaagcagttcttaacccagtgtccatggactcagaaactccatgatgcccctgagatggtatgcacaattccatgacaatatgccctttctggggagatagtccataatgttctgctaaatttcaaatgggctcgtgacccaaaaaagtcaagaaccacagcacttgagttaaaatactctttttacaatccatataagcccttgattggaagggcttttcaaaatcatttagtctaacaactgcccagtttccagtcgggggaactgaggcagagcaaggtagtgatcacaccagtacaagatttcaggtcccaggctcctatgcaagttttttttccccattatatcacacttatttagcaagggaccttgtggtttgtggctttagtggccatcatttctgggggttggcttttaccctttttcttgaatatttgccaccaagtgaaaaatgttaggacataaacccttgccaggtccctttcatttgctatctctattattggaaaggacctaaaaattggtgtaatggggcagaaatctgaggaatggacatttctaattcctgtttgttgaagggaagttgctggaaagagcatcagtacttgtttctatgcagatgcctgggccgtagcttgtctgtagcgtctgtataattataatgttgcccagtgtgagggaaagagctttcctacttgcactcttctaccaaggccctgttagtgcactgattatagtactgacagataaagcctagatgagagagatagagagtgagtacatgcacactcatgtgcaaacccactcagagatgcatttggaacagtgctactgaaaggcagtagtcattttcaagactgaattccaaacatggtttattggtgagttaggaacatgtaaggccaagtacactgagagcctttttgaaagtaattgagtggaaacttgatgccattctaaatcaaggcatatccaggtggcccggtttgaactcactccactgtacccagtctcaaaggccaggttgctaagaaaccaggagtaaaagagtcaagtgaccatcatttcacctgctgcttgcccccaatagtagtctctgtgaggccttactgacctcacctaggaagtgatttttgagcccttgtttcagggctgtggcctccctgctctatcctgaataaagcagacaggtgtgcagattttggccatgaaagcatggctaatagggccacagtccctttaaagaaacatggtttgactctggttttcttgggggaaaataccacaatcaccgatgcaaacattggaagattattgagagccctagaaagctgctgtgatcccagtagaaaatatgtcccagaaatgtcatgagattgctgtgtgttgcctgggacacagatcaagggcctatcttggagagctggggaccagcagtctgcctggaggccagggagcagtggctgagtagctctgcctttgctctggtctataccttaagaatgccaaagaatgaatttcaacgcctgcctttggcactctgacttaaagtgcaaaaagcttctgtggcgaggcatgctatcatggaatgagactggcttgccctaggcttaatggatgggcagtcattttgcagaggctatgggaagagggtgataatagaagagtggcagctataggaaattatcaacataccttggccagcaagttagagaatctggcaatggatgaactgaaagtgatgaactggcagggataacaaagaacctaacatttattaagcacgtatttattaactgctcagtgtttcatattcatgcaagtattctcattttacagagaaagaaattatggcccagggggctaaagtaaacaactcaagggcacatagaaagtaaataaaaggactgtgatttgaatccaggccactcttagcccatgctgttttccctttgccacactgtggtaggtgtttgaacagaggccacattactagagttggcatgactcttgactcttgcctgcctaacaaaatattgaaaggcaaacatttgaaggagggagggggtgcaggttcagtttatatggaaatgcaaactgggctggaagatattcctgagttaggctttctcttcatattcagcttgcacatttggtaatgtttttaaaatgatcatctaattttattttgtgaagtgaaggatttgtgttttagttggcagttgttaagtccttggcttgccatttttcaaaaagtaaaaaggtcctcacaggtgtctccatacttcgccaaggttgtagcatgggcagtttcagtttcagcctaagagactggtgacatccacaaatgcagttttagaagcagaaaaggtcttggtgcctctgcagtacttgatgtattggggtcaaatctctacaaatttttctgtggtgatagcaaaatcaagagatggcttacaaaaagaaatattgaatttttatttttgaagtttttgttttttaaaaggttgggggtgttcagccactgagggacaaaacttagcatctaatttcaattatagtgtcatgcagagtatttctaaagtaattggttatcatgggaaagtattctcttttcaagaagttctttgattctgtaataactagaacaaataaagtagtaaaagaagaaatagttctgtgactaggaaaaaattgcttttgagagaacatagatcaattatactacttctaaggtagctgcagataagtggccttgacacattacaagcctggaaaaaaacatcagaaataataaaaaatttcagagagaatcaagatacctttttttttcttttttttttcttttttttattatactctaagttttagggtacatgtgcacattgtgcaggttagttacatatgtatacatgtgccatgctggtgcgctgcacccactaatgtgtcatctagcattaggtatatctcccagtgctatccctcccccctcccccgaccccaccacagtccccagagtgtgatattccccttcctgtgtccatgtgatctcattgttcaattcccacctatgagtgagaatatgcggtgtttggttttttgttcttgcgatagtttactgagaatgatggtttccaatttcatccatgtccctacaaaggatatgaactcatcattttttatggctgcatagtattccatggtgtatatgtgccacattttcttaatccagtctatcattgttggacatttgggttggttccaagtctttgctattgtgaatagtgccgcaataaacatacgtgtgcatgtgtctttatagcagcatgatttatactcatttgggtatat

SEQ ID NO: 246 - protein, 802 aa, Homo sapiens
MGHPPLEFSDCYLDSPDFRERLKCYEQELERTNKFIKDVIKDGNALISAMRNYSSAVQKFSQTLQSFQFDFIGDTLTDDEINIAESFKEFAELLNEVENERMMMVHNASDLLIKPLENFRKEQIGFTKERKKKFEKDGERFYSLLDRHLHLSSKKKESQLQEADLQVDKERHNFFESSLDYVYQIQEVQESKKFNIVEPVLAFLHSLFISNSLTVELTQDFLPYKQQLQLSLQNTRNHFSSTREEMEELKKRMKEAPQTCKLPGQPTIEGYLYTQEKWALGISWVKYYCQYEKETKTLTMTPMEQKPGAKQGPLDLTLKYCVRRKTESIDKRFCFDIETNERPGTITLQALSEANRRLWMEAMDGKEPIYHSPITKQQEMELNEVGFKFVRKCINIIETKGIKTEGLYRTVGSNIQVQKLLNAFFDPKCPGDVDFHNSDWDIKTITSSLKFYLRNLSEPVMTYRLHKELVSAAKSDNLDYRLGAIHSLVYKLPEKNREMLELLIRHLVNVCEHSKENLMTPSNMGVIFGPTLMRAQEDTVAAMMNIKFQNIVVEILIEHFGKIYLGPPEESAAPPVPPPRVTARRHKPITISKRLLRERTVFYTSSLDESEDEIQHQTPNGTITSSIEPPKPPQHPKLPIQRSGETDPGRKSPSRPILDGKLEPCPEVDVGKLVSRLQDGGTKITPKATNGPMPGSGPTKTPSFHIKRPAPRPLAHHKEGDADSFSKVRPPGEKPTIIRPPVRPPDPPCRAATPQKPEPKPDIVAGNAGEITSSVVASRTRFFETASRKTGSSQGRLPGDES

SEQ ID NO: 247 - DNA, 763 bp, Homo sapiens
ttactttattcagagctaataagtgctttccttagttttctagtaactaggtgtaaaaatcatgtgtgcagctttatagtttttaaaatattttagataattcttaaactatgaaccttcttaacatcactgtcttgccagattaccgacactgtcacttgaccaatactgaccctctttacctcgcccacgcggacacacgcctcctgtagtcgcttgcctatgatgttcctttgggtctgtgaggttctgtaaactgtgctagtgctgacgatgttctgtacaacttaactcactggcgagaatacagcgtgggacccttcagccactacaacagaattttttaaattgacagttgcagaattgtggagtgtagatacattgatcttttgctaatgcaattagcattatgtttgcatgtatgacttacataaataccttgaatcataacacaacaaaacacacaaccacagaccacacataacaaggcgggcgacagcagactaaacgagacagtaccgccctcggaagggcgcgccccaaaccaggtatataccgcaatacacgccagaggatagacgatggggatcccaacgcggagagcaccacaaataaaggagaagcccgggcatatcaagaccgacaggcgacaacggggcagactgtagctagaccacaagagttacgacaaacggggagaccacaagaggaccacgaggaaacctcttaggaacacgcgcaccacgaaaactcagtgagaaaa

SEQ ID NO: 248 - DNA, 1012 bp, Homo sapiens
  CDS (18)..(851)
actgctttcttgggaagatggcggctgtgtcggtgtatgctccaccagttggaggcttctcttttgataactgccgcaggaatgccgtcttggaagccgattttgcaaagaggggatacaagcttccaaaggtccggaaaactggcacgaccatcgctggggtggtctataaggatggcatagttcttggagcagatacaagagcaactgaagggatggttgttgctgacaagaactgttcaaaaatacacttcatatctcctaatatttattgttgtggtgctgggacagctgcagacacagacatgacaacccagctcatttcttccaacctggagctccactccctctccactggccgtcttcccagagttgtgacagccaatcggatgctgaagcagatgcttttcaggtatcaaggttacattggtgcagccctagttttagggggagtagatgttactggacctcacctctacagcatctatcctcatggatcaactgataagttgccttatgtcaccatgggttctggctccttggcagcaatggctgtatttgaagataagtttaggccagacatggaggaggaggaagccaagaatctggtgagcgaagccatcgcagctggcatcttcaacgacctgggctccggaagcaacattgacctctgcgtcatcagcaagaacaagctggattttctccgcccatacacagtgcccaacaagaaggggaccaggcttggccggtacaggtgtgagaaagggactactgcagtcctcactgagaaaatcactcctctggagattgaggtgctggaagaaacagtccaaacaatggacacttcctgaatggcatcagtgggtggctggccgcggttctggaaggtggtgagcattgaggcccagtaagacactcatgtggctagtgtttgccgaatgaaactcaactcaataaaaaacaaaaaccaaattgggcagctgaaaaaaaaaaaaaaaaaaaaaaaaaaaaa

SEQ ID NO: 249 - protein, 277 aa, Homo sapiens
MAAVSVYAPPVGGFSFDNCRRNAVLEADFAKRGYKLPKVRKTGTTIAGVVYKDGIVLGADTRATEGMVVADKNCSKIHFISPNIYCCGAGTAADTDMTTQLISSNLELHSLSTGRLPRVVTANRMLKQMLFRYQGYIGAALVLGGVDVTGPHLYSIYPHGSTDKLPYVTMGSGSLAAMAVFEDKFRPDMEEEEAKNLVSEAIAAGIFNDLGSGSNIDLCVISKNKLDFLRPYTVPNKKGTRLGRYRCEKGTTAVLTEKITPLEIEVLEETVQTMDTS

SEQ ID NO: 250 - DNA, 574 bp, Homo sapiens
  CDS (50)..(376)
gacggttaccccggctctccgcccctccttctcgcgcgctcgagggaccatggccgatcctcgcgtgagacagatcaagatcaagaccggcgtggtgaagcggttggtcaaagaaaaagtgatgtatgaaaaagaggcaaaacaacaagaagaaaagattgaaaaaatgagagctgaagacggtgaaaattatgacattaaaaagcaggcagagatcctacaagaatccaggatgatgatcccagattgccagcgcaggttggaagccgcatatttggatcttcaacggatactagaaaatgaaaaagacttggaagaagctgaggaatataaagaagcacgtttagtactggattcagtgaagttagaagcctgaaacttttctcgtatggggtggtttttgcattaaatcctggggtccattttacaatccattatttttgaccactgctatgtgttcaagtagtatgagaatgtgattgtttttatctggttacatatatatttctttgtctaatttaatatgtcaaataaatgagttcatctaaaaaaaaaaaaaaaaaaaaaaaaaaaa

SEQ ID NO: 251 - protein, 108 aa, Homo sapiens
MADPRVRQIKIKTGVVKRLVKEKVMYEKEAKQQEEKIEKMRAEDGENYDIKKQAEILQESRMMIPDCQRRLEAAYLDLQRILENEKDLEEAEEYKEARLVLDSVKLEA

SEQ ID NO: 252 - DNA, 5766 bp, Homo sapiens
  CDS (978)..(2465)
cgccgccgcagccgccgccaccaacgccaacaacaacgtgtcgggagcagccgcggccgaagccggagcaggggccggagtcgcggctggagtggggcctgcgcgtgtgagtggccgagagttgcccgtgccggagacctcaaactccgggcgggagcgctttcggtgggccgagccgccgtcgcccgcggcaccgtgtccccaaggcccagacagcggggcgggggtctatcaggcgcgggactggcttctctcaggccgacccttctagccgggctccggatcttcctcggcctcgggcccccttcacgttcaggacggaggccggagaacggtgatcatcacacaccccagccggcttcctggccagggcattttctctgcggccaagcagtgttgggattgtagctgctgggagccccctcctgccgccacctctcctgcaaggaagggactgacgcgttcccactttcttactctgcacctccccactctcttcccattcaagaacgagtttctcttccctctccattggaaatcctgctccggaggtccaaaacacgtattttaagcgtgcccttcctcacctcctggagcacccttagaagtattgcctacttatccgggctgagaatccttcatttttgacctggcttttttttcgccctttgggagataaaggtccctctccaccctctactaacactctgcacccaaggccttatcctttggggtcaccagctccttggccatttctatgtgatttcccccacccatctgagttccagtttcctctgggctccaatctccagtccctggcggatctggtcagtcccacccctaggtgggagtgaccagggggctctggcccaggattcccaaccctggaaggcagctccaaggcaggaagagaattgggcatcgggtacgaacctggcagctcaggagtcggggctccactcaccccacacaaaaagatgaaaaagcgcaaagagctcaatgcattgattggtttggctggggacagccggagaaagaagcccaagaaaggcccaagcagtcaccgcctgcttcgcactgagcctcccgactcagactctgagtccagctccgaagaggaagaggaattcggtgtggttggaaatcgctctcgctttgccaagggagactatttacgatgctgcaagatctgttatccgctctgtggttttgtcatccttgctgcctgtgttgtggcctgtgttggcttggtgtggatgcaggttgctctcaaggaggatctggatgccctcaaggaaaaatttcgaacaatggaatctaatcagaaaagctcattccaagaaatccccaaacttaatgaagaactactcagcaagcaaaaacaacttgagaagattgaatctggagagatgggtttgaacaaagtctggataaacatcacagaaatgaataagcagatttctctgttgacttctgcagtgaaccacctcaaagccaatgttaagtcagctgcagacttgattagcctgcctaccactgtagagggacttcagaagagtgtagcttccattggcaatactttaaacagcgtccatcttgctgtggaagcactacagaaaactgtggatgaacacaagaaaacgatggaattactgcagagtgatatgaatcagcacttcttgaaggagactcctggaagcaaccagatcattccgtcaccttcagccacatcagaacttgacaataaaacccacagtgagaatttgaaacaggatatcctgtaccttcacaactctttagaggaggtaaacagtgccctagtggggtaccagagacagaatgatcttaaactcgagggaatgaacgagacagtcagtaatcttacccagagagtcaacctgatagaaagcgatgtggttgctatgagcaaggtagaaaagaaagcaaacctgtccttcagcatgatgggtgatagatctgccactctgaaaagacagtctttggatcaagtcaccaacagaacagatacagtaaaaatccaaagcataaagaaagaagatagttcaaattctcaggtatccaagctaagagagaaactccagctgatcagtgctcttacaaacaaacctgagagcaacaggcctccagagaccgccgatgaagagcaagtagagagtttcacatcaaagccatcagcattgccaaaattttcacagtttcttggagacccagttgagaaagctgcccaactaagacctatctccctaccaggagtttctagcactgaagatcttcaggatttattccgcaagactggccaggacgtggatgggaagctgacctaccaggaaatctggacctccctaggttctgctatgccagaaccagagagcttgagagcatttgattccgatggagatggaagatactcattcctggagctaagggtagctttaggtatctagcttcatcaggcatattttagaaatggactgcctaatatctatttacctaacaacaaaacaacccttacttacccatcagtcctctagtcctccaaactactgtagcagatactttgccaccttttaacttgtttgaagaagctatataaaagttatttttttaaagaagaagaccattttacttatgatgttcagaaatctatgatttcctacaaccagtaagatcttacattttaaaattgccagaaaaaaaattaaagccctctttttttctctttcctttttttgaggggaggagaccttatcttttaaagctgggaaatgtatatagagagagaataagccacttttatatttcacttaaatttgccttaaattagctgcactttatagagactcagaaaatgtcttttctttaaaagataggccttttctgtttgtaaatatttaaatgaaagaaagcattgtgcatattgtgtggaaagtaggaagaatggttttgaacaggatatgaacaaatgacttattaaaaattgctgatctggtgtaggtggcagctgaaactacatccatgtctccataaggcatccctcaaaggcccaggcgctgccagggggtttgtcctggtagctggaggaaccgatttcagggaatagacactggagacaatactgactccaggcatggctcatggaagtaggattctggttctttgttcctattccctcagctaatcccaacctgggaatcagagaagtcttggggatttttctcatttttagtactatttcagggtttatgagcataaaaagttatccattggggagctccattttccctgctgagtgagctagattgccttccccacccacccacttaagtctgtcttaaagccgtagctggctcccaccaccagtaccatctccatttgaatggcagggctaaattcccccagccattatctcacactgaccacccagagctttagaagagagctgtgcttctaattttgacccagaaaaccataccccttgagattttacctagaggctaaccaagagcctaatatgtttctctgggggatgactaaagccaaaaaggctgtgagatgaaacatgtgaaataatattcagtttccttaccattaccagctcagaagtagctagaggctttctacccaaaggatgccaaagtatagcagggcaggcctggagctagggccttcacatggtggtagcaagtttttcaaatctaatacaatcaagtacaatacttcctttaaatgcttctgtggacctggcatgaaagatccctagattgaaaggaataatacctccatgtctcctgtatgttgagtctagaattgctgtgttgttcttagaagcagtctttgggcaacaacttgaaaggggaaaaaaaaactacaaaaacttaactttggtataggccaagtcagggagaaagtagagaaagctgtcatgccacagacttctttagtggagatcatttcctttttaactttgttcaggttgcccttcaccatggatacagtccggtacccttaaacatttaagggctgtttttttttttctttatatgatgttcagcttggtattaaccaaacttaaattttttttccagaagtattaaaatttagttaaagcaagatgaagtcttttcccatgaatgtgtccccttatctcattatagcttatgctcagtttcactttcttggaaaggttaaaacaaattagcctggcactttaggtaacttgaaaataactctcacccttctgactgccttccatccactctcaccccacacctttttttaatatatatacacccttacagattttctaacaaccaaataaaattctagcaataaattgaattatactgctatatttgtatatactgtaccataaatagtatgtctgtacctggaaggtatttttttgagaactgatttatatgaaatatacttgagggtaatgtagcttgtcctttttagtttcaaattcttattcataggcagatactttgaagacaccttaactctttgttgtgtgtattttcccttgcatcagataactatacatggagaaatccattttgttttttggtttatcttctgttcttcctaccttgtgcttgtctgactagtatcacccctgagccagtatacagtaccatcctctccccctaccaagtttggcagaggtgtttatactgcattctcagatctatgaatatttttgtcatcctgcctgagaaagtacatcttccaggcaaaagtagggtatcttgaactcctttcttctgagttgagcagactcactggcttaagcatcccataagcctattatttagtgtgaatttgggacttttatttgtatgttgtcttaacttactgagcctgtgacttgtatttagctgtagtcaagcctcaccagccatatctcatctctgagaggaagactggatagtgagtttggttttggttttggttttaaacccttttaccttttcagtctggcagctcctactgctgctttcctaagttactcaaagcactgcttcttggtccttgttttcttttgccttgtactatcttgtataatgtttactaaaagagcctccccataaatcagagaggcaaaaaggtagcatataaaaagaagaaccaaaagaagagaaaacctgacttctagatgactgtggtgtcatctaaaaggcagaggtgcctgaccctcaggaatgtgtatgatgcaacagagctgaagaatgggttcccttcacctactgctggccattgtcccttctgttggagattcctttctttatggttgctgttcataaccccttcaacacccccccttgctggtcctgccggtcacagttgaggattttggctgtgatgggctcatactcataatggcctgttgagttgtttttagtgacaggttttgtttgctgcacacctcattggcttgcttaccaacaccagctagaagtggtccctctttcatatccaaaccagaacacatttgggtattcctgagactttatagagcgtgtattgtttgttatacgaacctaacctaccttgttgttttctcatattaagaaatttaaatctactttgttttagtgaagctattttggtaatgtataagcaattttggttctgtttagggagaattcagggtttccatgacttgatttgagctttgcatatttcaaataagtaacacagccattttaatttagctaaataaaaaaatttcttttttctctc

SEQ ID NO: 253 - protein, 495 aa, Homo sapiens
MKKRKELNALIGLAGDSRRKKPKKGPSSHRLLRTEPPDSDSESSSEEEEEFGVVGNRSRFAKGDYLRCCKICYPLCGFVILAACVVACVGLVWMQVALKEDLDALKEKFRTMESNQKSSFQEIPKLNEELLSKQKQLEKIESGEMGLNKVWINITEMNKQISLLTSAVNHLKANVKSAADLISLPTTVEGLQKSVASIGNTLNSVHLAVEALQKTVDEHKKTMELLQSDMNQHFLKETPGSNQIIPSPSATSELDNKTHSENLKQDILYLHNSLEEVNSALVGYQRQNDLKLEGMNETVSNLTQRVNLIESDVVAMSKVEKKANLSFSMMGDRSATLKRQSLDQVTNRTDTVKIQSIKKEDSSNSQVSKLREKLQLISALTNKPESNRPPETADEEQVESFTSKPSALPKFSQFLGDPVEKAAQLRPISLPGVSSTEDLQDLFRKTGQDVDGKLTYQEIWTSLGSAMPEPESLRAFDSDGDGRYSFLELRVALGI

SEQ ID NO: 254 - DNA, 1833 bp, Homo sapiens
  CDS (59)..(1447)
ggcacgagggtttgccgccagaacacaggtgtcgtgaaaactacccctaaaagccaaaatgggaaaggaaaagactcatatcaacattgtcgtcattggacacgtagattcgggcaagtccaccactactggccatctgatctataaatgcggtggcatcgacaaaagaaccattgaaaaatttgagaaggaggctgctgagatgggaaagggctccttcaagtatgcctgggtcttggataaactgaaagctgagcgtgaacgtggtatcaccattgatatctccttgtggaaatttgagaccagcaagtactatgtgactatcattgatgccccaggacacagagactttatcaaaaacatgattacagggacatctcaggctgactgtgctgtcctgattgttgctgctggtgttggtgaatttgaagctggtatctccaagaatgggcagacccgagagcatgcccttctggcttacacactgggtgtgaaacaactaattgtcggtgttaacaaaatggattccactgagccaccctacagccagaagagatatgaggaaattgttaaggaagtcagcacttacattaagaaaattggctacaaccccgacacagtagcatttgtgccaatttctggttggaatggtgacaacatgctggagccaagtgctaacatgccttggttcaagggatggaaagtcacccgtaaggatggcaatgccagtggaaccacgctgcttgaggctctggactgcatcctaccaccaactcgtccaactgacaagcccttgcgcctgcctctccaggatgtctacaaaattggtggtattggtactgttcctgttggccgagtggagactggtgttctcaaacccggtatggtggtcacctttgctccagtcaacgttacaacggaagtaaaatctgtcgaaatgcaccatgaagctttgagtgaagctcttcctggggacaatgtgggcttcaatgtcaagaatgtgtctgtcaaggatgttcgtcgtggcaacgttgctggtgacagcaaaaatgacccaccaatggaagcagctggcttcactgctcaggtgattatcctgaaccatccaggccaaataagcgccggctatgcccctgtattggattgccacacggctcacattgcatgcaagtttgctgagctgaaggaaaagattgatcgccgttctggtaaaaagctggaagatggccctaaattcttgaagtctggtgatgctgccattgttgatatggttcctggcaagcccatgtgtgttgagagcttctcagactatccacctttgggtcgctttgctgttcgtgatatgagacagacagttgcggtgggtgtcatcaaagcagtggacaagaaggctgctggagctggcaaggtcaccaagtctgcccagaaagctcagaaggctaaatgaatattatccctaatacctgccaccccactcttaatcagtggtggaagaacggtctcagaactgtttgtttcaattggccatttaagtttagtagtaaaagactggttaatgataacaatgcatcgtaaaaccttcagaaggaaaggagaatgttttgtggaccactttggttttcttttttgcgtgtggcagttttaagttattagtttttaaaatcagtactttttaatggaaacaacttgaccaaaaatttgtcacagaattttgagacccattaaaaaagttaaatgagaaaaaaaaaaaaaaaaaaaaaaaaaaaaaaaaaaaaaaaaaaaaaaaaaaaaaaaaaaaaaaaaaaaaaaaaaaaaaaaaaaaaaaaaaaaaaa

SEQ ID NO: 255 - protein, 462 aa, Homo sapiens
MGKEKTHINIVVIGHVDSGKSTTTGHLIYKCGGIDKRTIEKFEKEAAEMGKGSFKYAWVLDKLKAERERGITIDISLWKFETSKYYVTIIDAPGHRDFIKNMITGTSQADCAVLIVAAGVGEFEAGISKNGQTREHALLAYTLGVKQLIVGVNKMDSTEPPYSQKRYEEIVKEVSTYIKKIGYNPDTVAFVPISGWNGDNMLEPSANMPWFKGWKVTRKDGNASGTTLLEALDCILPPTRPTDKPLRLPLQDVYKIGGIGTVPVGRVETGVLKPGMVVTFAPVNVTTEVKSVEMHHEALSEALPGDNVGFNVKNVSVKDVRRGNVAGDSKNDPPMEAAGFTAQVIILNHPGQISAGYAPVLDCHTAHIACKFAELKEKIDRRSGKKLEDGPKFLKSGDAAIVDMVPGKPMCVESFSDYPPLGRFAVRDMRQTVAVGVIKAVDKKAAGAGKVTKSAQKAQKAK

SEQ ID NO: 256 - DNA, 2146 bp, Homo sapiens
  CDS (28)..(1638)
cgctcgcgctggaagaagcggaagaagatggcgctcaccagctttttacctgcacctactcagctatctcaggaccagcttgaggctgaagaaaaggcaagatcccagagatcacggcagacctcactggtctcctcccgaagagaacctcccccgtacggataccggaaaggctggatacctcggttattagaggattttggagatggaggtgcttttccagagatccatgtggcccagtatccactggatatgggacgaaagaaaaaaatgtcgaatgcgctggccattcaggtggattctgaaggaaaaattaaatatgatgcaattgctcgacaaggacagtcaaaagacaaggtcatttatagcaaatacactgacctggttccaaaggaggttatgaatgcagatgatccagacctgcaaaggcccgatgaagaagctattaaagagataacagaaaagacaagagtagccttagaaaaatctgtatcacagaaggtcgccgcagccatgccagttcgagcagctgacaaattggctcctgctcagtatatccgatacacaccatctcagcaaggagtggcattcaactctggagctaaacagagggttattcggatggtagaaatgcagaaagatccaatggagcctccaaggttcaagattaataagaaaattccccggggaccaccttctcctcctgcgcctgtcatgcattctcctagccgaaagatgactgtaaaggaacaacaagagtggaagattcctccttgtatttctaactggaaaaatgcaaagggttatacaattccattagacaaacgtctggctgctgatggaagaggactacagacagtacacataaatgaaaatttcgccaaattggcagaagccctctacattgctgatcggaaggctcgtgaagctgtggaaatgcgtgcccaagtagagagaaaaatggctcagaaagaaaaggaaaaacatgaagagaaacttagagaaatggcccagaaagccagggagagaagagctgggatcaaaactcatgtggaaaaagaggatggggaggcacgtgagagggatgaaatccggcatgacaggcgaaaagagagacagcatgaccggaatctttccagggcagctcctgataagaggtcgaaacttcagagaaatgaaaatcgggatatcagtgaagttattgctctcggtgttcctaatcctcggacttccaatgaagttcagtatgaccaaaggctcttcaaccaatccaagggtatggacagtggatttgcaggtggagaagatgaaatttataatgtttatgatcaagcctggagaggtggtaaagatatggcccagagtatttataggcccagtaaaaatctggacaaggacatgtatggtgatgacctagaagccagaataaagaccaacagatttgttcccgacaaggagttttctggttcagaccgtagacagagaggccgagaaggaccagtgcagtttgaggaagatccttttggtttggacaagtttttggaagaagccaaacagcatggtggctctaaaagaccctcagatagcagccgccccaaggaacacgagcatgaaggcaagaagaggaggaaggaataggcacaggtctctccaaagtgaatgaactcttacccataaccctaatgatgcaagtcatatgggggaacactttgtaaatggtcaggataaaaaccaaatctgggtgccagatcccagcactactttttattactggagaaatgggggggatagaaaattctactttgaattatttagttttttttaaagagtgggttgtgtttgtgcttctcccacctttcagcatttatagaacatgctgccccacatacaaagtcaagaccacttacttttatgtgacactagtagtttggggttaatgttttgtgtaagaacagctgcatatgagtaaagttaccccaaccacagtgaggaggaagatgttcacatactggaactgtcctgccaaataaattttgcccctattgtgctctgttttaatttggagtgggcaaagtaacctcttgcttggtgcaactatttgtttcaaataaaaacatttagacaaaaaaaaaaaaaaaaaaaaaaa

SEQ ID NO: 257 - protein, 536 aa, Homo sapiens
MALTSFLPAPTQLSQDQLEAEEKARSQRSRQTSLVSSRREPPPYGYRKGWIPRLLEDFGDGGAFPEIHVAQYPLDMGRKKKMSNALAIQVDSEGKIKYDAIARQGQSKDKVIYSKYTDLVPKEVMNADDPDLQRPDEEAIKEITEKTRVALEKSVSQKVAAAMPVRAADKLAPAQYIRYTPSQQGVAFNSGAKQRVIRMVEMQKDPMEPPRFKINKKIPRGPPSPPAPVMHSPSRKMTVKEQQEWKIPPCISNWKNAKGYTIPLDKRLAADGRGLQTVHINENFAKLAEALYIADRKAREAVEMRAQVERKMAQKEKEKHEEKLREMAQKARERRAGIKTHVEKEDGEARERDEIRHDRRKERQHDRNLSRAAPDKRSKLQRNENRDISEVIALGVPNPRTSNEVQYDQRLFNQSKGMDSGFAGGEDEIYNVYDQAWRGGKDMAQSIYRPSKNLDKDMYGDDLEARIKTNRFVPDKEFSGSDRRQRGREGPVQFEEDPFGLDKFLEEAKQHGGSKRPSDSSRPKEHEHEGKKRRKE

SEQ ID NO: 258 - DNA, 1227 bp, Homo sapiens
  CDS (132)..(437)
cgtagcggaagttactgcagccgcggtgttgtgctgtggggaagggagaaggatttgtaaaccccggagcgaggttctgcttacccgaggccgctgctgtgcggagacccccgggtgaagccaccgtcatcatgtctgaccaggaggcaaaaccttcaactgaggacttgggggataagaaggaaggtgaatatattaaactcaaagtcattggacaggatagcagtgagattcacttcaaagtgaaaatgacaacacatctcaagaaactcaaagaatcatactgtcaaagacagggtgttccaatgaattcactcaggtttctctttgagggtcagagaattgctgataatcatactccaaaagaactgggaatggaggaagaagatgtgattgaagtttatcaggaacaaacggggggtcattcaacagtttagatattctttttatttttttttcttttccctcaatccttttttatttttaaaaatagttcttttgtaatgtggtgttcaaaacggaattgaaaactggcaccccatctctttgaaacatctggtaatttgaattctagtgctcattattcattattgtttgttttcattgtgctgatttttggtgatcaagcctcagtccccttcatattaccctctcctttttaaaaattacgtgtgcacagagaggtcacctttttcaggacattgcattttcaggcttgtggtgataaataagatcgaccaatgcaagtgttcataatgactttccaattggccctgatgttctagcatgtgattacttcactcctggactgtgactttcagtgggagatggaagtttttcagagaactgaactgtggaaaaatgacctttccttaacttgaagctacttttaaaatttgagggtctggaccaaaagaagaggaatatcaggttgaagtcaagatgacagataaggtgagagtaatgactaactccaaagatggcttcactgaagaaaaggcattttaagattttttaaaaatcttgtcagaagatcccagaaaagttctaattttcattagcaattaataaagctatacatgcagaaatgaatacaacagaacactgctctttttgattttatttgtactttttggcctgggatatgggttttaaatggacattgtctgtaccagcttcattaaaataaacaatatttgtaaaaatcaaaaaaaaaaaaaaaaaaaa

SEQ ID NO: 259 - protein, 101 aa, Homo sapiens
MSDQEAKPSTEDLGDKKEGEYIKLKVIGQDSSEIHFKVKMTTHLKKLKESYCQRQGVPMNSLRFLFEGQRIADNHTPKELGMEEEDVIEVYQEQTGGHSTV

SEQ ID NO: 260 - DNA, 1183 bp, Homo sapiens
  CDS (59)..(829)
agattctcctatcggggtcacagggacgctaagattgctacctggactttcgttgaccatgctgtcccgggtggtactttccgccgccgccacagcggccccctctctgaagaatgcagccttcctaggtccaggggtattgcaggcaacaaggacctttcatacagggcagccacaccttgtccctgtaccacctcttcctgaatacggaggaaaagttcgttatggactgatccctgaggaattcttccagtttctttatcctaaaactggtgtaacaggaccctatgtactcggaactgggcttatcttgtacgctttatccaaaggaatatatgtgattagcgcagagaccttcactgccctatcagtactaggtgtaatggtctatggaattaaaaaatatggtccctttgttgcagactttgctgataaactcaatgagcaaaaacttgcccaactagaagaggcgaagcaggcttccatccaacacatccagaatgcaattgatacggagaagtcacaacaggcactggttcagaagcgccattacctttttgatgtgcaaaggaataacattgctatggctttggaagttacttaccgggaacgactgtatagagtatataaggaagtaaggaatcgcctggactatcatatatctgtgcagaacatgatgcgtcgaaaggaacaagaacacatgataaattgggtggagaagcacgtggtgcaaagcatctccacacagcaggaaaaggagacaattgccaagtgcattgcggacctaaagctgctggcaaagaaggctcaagcacagccagttatgtaaatgtatctatcccaattgagacagctagaaacagttgactgactaaatggaaactagtctatttgacaaagtctttctgtgttggtgtctactgaagttatagtttacccttcctaaaaatgaaaagtttgtttcatatagtgagagaacgaaatctctatcggccagtcagatgtttctcatccttcttgctctgcctttgagttgttccgtgatcacttctgaataagcagtttgcctttataaaaacttgctgcctgactaaagattaacaggttatagtttaaatttgtaattaattctaccatcttgcaataaagtgacaaaaaaaaaaaaaaaaaaaaaaaaaaaaaa

SEQ ID NO: 261 - protein, 256 aa, Homo sapiens
MLSRVVLSAAATAAPSLKNAAFLGPGVLQATRTFHTGQPHLVPVPPLPEYGGKVRYGLIPEEFFQFLYPKTGVTGPYVLGTGLILYALSKGIYVISAETFTALSVLGVMVYGIKKYGPFVADFADKLNEQKLAQLEEAKQASIQHIQNAIDTEKSQQALVQKRHYLFDVQRNNIAMALEVTYRERLYRVYKEVRNRLDYHISVQNMMRRKEQEHMINWVEKHVVQSISTQQEKETIAKCIADLKLLAKKAQAQPVM

SEQ ID NO: 262 - DNA, 624 bp, Homo sapiens
  misc_feature (485)..(485): n is a, c, g, or t
  misc_feature (497)..(497): n is a, c, g, or t
  misc_feature (530)..(530): n is a, c, g, or t
  misc_feature (549)..(549): n is a, c, g, or t
  misc_feature (564)..(564): n is a, c, g, or t
  misc_feature (586)..(586): n is a, c, g, or t
  misc_feature (614)..(614): n is a, c, g, or t
gactataagccatgcaacaatgtcttttattatgtatgcggttttaaaattatttcttgaatctctccatacacaggcaaaaataagtgtgttacttaacatactggaaattgcctaacttaatcattgcctaaagaagagaaaattatccccaaaacgtgcttaaccaggaggccaatgcatttgccgacctccaagaacatggagatgaacgtgatagacagactgtccaccatctgaaccttcattcaccaccattcgataacccttattcaggcccagatcagcagcacatttcttgccaacaatcattaagtgtccaagaagactttcatcatcatcttctgccacagaaatctgggatatatgtttcttgggtatcaccagaaaatgtgttggtgcttgagggggaaatgtcatggaaagcaaggcaccggtcatcctccaaaatgattttggctgggaattccctgcggatgatcttnccgaagatcgtntcgccaccaggccgagcgacctgagcccttggnatctcatctggcacctcgngccgaatcttggccncgagggcaaattcccatagggngtcggattaaatcggaacatggcaagcngttcccgggg

SEQ ID NO: 263 - DNA, 2841 bp, Homo sapiens
  CDS (52)..(1218)
agaccacagagccctgggttgtggaagaggtggctgttccctgtcatcagtatgcagcgattgctctttccgccgttgagggccttgaaggggaggcagtatctgccgctcctggctcctagggcagcgcctagagcacagtgtgattgcatcaggcgccctttgaggccagggcaatacagcaccatctctgaagtagctttgcaatctggaaggggtacagtgtcccttccctcaaaggctgctgagcgggtggtgggccgatggctcctggtctgcagtggaacagtggctggagcagttattcttggtggagtaactaggttgacagagtctggcctctcgatggtagattggcatttaataaaggagatgaagccacctacaagccaagaggaatgggaagcagaattccaaagataccagcaatttccagaatttaaaatcttgaatcatgatatgacactgacagaattcaagttcatctggtacatggagtactcacaccgaatgtggggtcgccttgtaggccttgtgtacatcctgcctgctgcctacttttggagaaagggctggctcagccgtggcatgaaaggacgtgttcttgccctctgtggcctcgtctgcttccagggtctgttgggatggtatatggtgaaaagtggactagaagaaaaatcagactcccatgacatccctcgggtcagtcagtaccgccttgctgcccacctgggatcagccctggttctttattgtgccagcttgtggacctcactgtcactgctactccctccgcacaagttgcctgaaacccaccaactcctacagttgagacgatttgctcatggaacagcaggtctggtgttccttacggccctctcaggggcttttgtggcagggctagatgctgggcttgtttataactcctttcccaaaatgggagaatcctggatcccggaggacctctttaccttctcccccatcctgaggaatgtttttgagaatcccaccatggtgcagtttgatcaccggattctgggaatcacttcagtcactgccattacagtgctctacttcctctctcggagaattccccttcctagaaggaccaagatggcagcagtgactctgctggctttggcgtatacacagggccctgtcttattcaactttacttttaaaatcagtgatttggatgaaggcatcagaaacatctgatttgaggatggagcaacccaatattgctaatataatagatgacagtggcaactgaaaacagtcccagaatgaccccatcgagatgaaattaaacagattagaaatgtaacatactcatttaaattaaataagttgtataagtttgggctgaagaaacctggccttatatcatttcatataaaaaagacgggattttagttgtcctcaggttcaatatgaaccaagtagtattcatgttgttattatatgataacagaaaaattagtggtacttcaggttttatcagtagaagtgtcacagccatagtcaaaatacccctaacatactgcatttcactctgggtaccaaatttaagcaagatattgatggccactaagtgtgtatccagaagaagagatcagaatgatgagtccagaacccctgtcacacagggaataggtgaaggaactagggatatttaactggagcagagaacatctggagagagagcaagattcctgtccttgagaagttgaagccgtctcatgcagaagagggaatgagcttccattatgctgcagagctggcagcaatggatgaaagttgcaggaagttagttttagttctgtagaaggcaagagtagggtagaccaaatcaaatgctcactggggtcaggctgatggagacagtaacactggcgagcaggtgccccagctcggactatactgctgagttctggtctgttgctgccactctacaggtccagggttgttagatcttctgggtttttgttttgctttttgaaataaggaaaataagcttatcttaagtttatttttccttggatatacctagattccatacagtgacaatacaaatacaaaggaagaacatctggatttcatccttgacctcatttacaaagcaaaaagagatgctggattcagatataaatgtttaattttgcagtgtttaagtcagcaaatcttctgttttttaaaaataagccacatatctagatttttctgtgaaagctctcaattaagtgttgggaactaatttcaagattttaaaaaatgttatgcaggcttaacgtgtctgagagccataaatgacctaacgtttcccgttagtctctgaactaggtgatctcagttctctttcaactccagtactctgtaagtttctgtgacctgtagtgtaccattctcaggtggtgatatggtttggatgttttgtcccctccaaatctcatgttcaaagtgtgacattcagtgttagaggtgggcctagtaggaggtatttgggtcatgggggcggatcccttatgtatgactttgtgccatccccatagtaatgagtgagttctcactctggttgtttatgcaagagctggttgtttaaaagagcctggaacttcctcctctctcgcttgctctctctcaccatgtgacacactggctccccttcaccttctgccatgattgtaagcttcgtgaggccctcaccagaagcagatgccagcgccatgcttcctatacagttctatgcagaacagtgagccaaataaacctcttttctttctaaaaaaaaaaaaaaaaaaaaaaaaaaaaaaaaaaaaaaaaaaaaaaaaaaaaaaaaaa

SEQ ID NO: 264 - protein, 388 aa, Homo sapiens
MQRLLFPPLRALKGRQYLPLLAPRAAPRAQCDCIRRPLRPGQYSTISEVALQSGRGTVSLPSKAAERVVGRWLLVCSGTVAGAVILGGVTRLTESGLSMVDWHLIKEMKPPTSQEEWEAEFQRYQQFPEFKILNHDMTLTEFKFIWYMEYSHRMWGRLVGLVYILPAAYFWRKGWLSRGMKGRVLALCGLVCFQGLLGWYMVKSGLEEKSDSHDIPRVSQYRLAAHLGSALVLYCASLWTSLSLLLPPHKLPETHQLLQLRRFAHGTAGLVFLTALSGAFVAGLDAGLVYNSFPKMGESWIPEDLFTFSPILRNVFENPTMVQFDHRILGITSVTAITVLYFLSRRIPLPRRTKMAAVTLLALAYTQGPVLFNFTFKISDLDEGIRNI

SEQ ID NO: 265 - DNA, 798 bp, Homo sapiens
  CDS (169)..(444)
ccatcgctctcccgggcttagaaggccggctactgacgcgcagtgccagaccttagccctcacggtccttaagtctcggtcgccctcgcctcgcagcctgccacccgcgctcagctgcccgcctcctcagccagccatgctgagcatctgagctcgctgcccacgcagatggattacaagggccagaagctagctgaacagatgtttcagggaattattcttttttctgcaatagttggatttatctacgggtacgtggctgaacagttcgggtggactgtctatatagttatggccggatttgctttttcatgtttgctgacacttcctccatggcccatctatcgccggcatcctctcaagtggttacctgttcaagaatcaagcacagacgacaagaaaccaggggaaagaaaaattaagaggcatgctaaaaataattgaggttttcatgattcagcacctgcttttgtttctgtgagatgagctaaattgctttcataccccagataagagctaaaaccacctaatgctcttatggcacagctgtgtatagatttagttctctttatacttcatttctagcccagttgggttttgatttatataagtagtttagaccttctcttcataatcttgctctgagatggggaacagaacacacaagtatgaagtttctttcaggtgtaaataatgaaaaataaatgcctcataaatgatagtacaatgtaactatcaaagttttataattcattatgagttaaccattttaatgtttccaattaaacctcatagtgc

SEQ ID NO: 266 - protein, 91 aa, Homo sapiens
MDYKGQKLAEQMFQGIILFSAIVGFIYGYVAEQFGWTVYIVMAGFAFSCLLTLPPWPIYRRHPLKWLPVQESSTDDKKPGERKIKRHAKNN

SEQ ID NO: 267 - DNA, 1072 bp, Homo sapiens
  CDS (14)..(742)
cagagctgctgtcatggcggccgctctgtggggcttctttcccgtcctgctgctgctgctgctatcgggggatgtccagagctcggaggtgcccggggctgctgctgagggatcgggagggagtggggtcggcataggagatcgcttcaagattgaggggcgtgcagttgttccaggggtgaagcctcaggactggatctcggcggcccgagtgctggtagacggagaagagcacgtcggtttccttaagacagatgggagttttgtggttcatgatataccttctggatcttatgtagtggaagttgtatctccagcttacagatttgatcccgttcgagtggatatcacttcgaaaggaaaaatgagagcaagatatgtgaattacatcaaaacatcagaggttgtcagactgccctatcctctccaaatgaaatcttcaggtccaccttcttactttattaaaagggaatcgtggggctggacagactttctaatgaacccaatggttatgatgatggttcttcctttattgatatttgtgcttctgcctaaagtggtcaacacaagtgatcctgacatgagacgggaaatggagcagtcaatgaatatgctgaattccaaccatgagttgcctgatgtttctgagttcatgacaagactcttctcttcaaaatcatctggcaaatctagcagcggcagcagtaaaacaggcaaaagtggggctggcaaaaggaggtagtcaggccgtccagagctggcatttgcacaaacacggcaacactgggtggcatccaagtcttggaaaaccgtgtgaagcaactactataaacttgagtcatcccgacgttgatctcttacaactgtgtatgttaactttttagcacatgttttgtacttggtacacgagaaaacccagctttcatcttttgtctgtatgaggtcaatattgatgtcactgaattaattacagtgtcctatagaaaatgccattaataaattatatgaactactatacattatgtatattaattaaaacatcttaatccagaaaaaaaaaaaaaaaaaaaaa

SEQ ID NO: 268 - protein, 242 aa, Homo sapiens
MAAALWGFFPVLLLLLLSGDVQSSEVPGAAAEGSGGSGVGIGDRFKIEGRAVVPGVKPQDWISAARVLVDGEEHVGFLKTDGSFVVHDIPSGSYVVEVVSPAYRFDPVRVDITSKGKMRARYVNYIKTSEVVRLPYPLQMKSSGPPSYFIKRESWGWTDFLMNPMVMMMVLPLLIFVLLPKVVNTSDPDMRREMEQSMNMLNSNHELPDVSEFMTRLFSSKSSGKSSSGSSKTGKSGAGKRR

SEQ ID NO: 269 - DNA, 2224 bp, Homo sapiens
ccagttacagaccttttggggttcaggatgctatagattgacaccctcctgcctgtttttctctgcaccccaacctggccaaggcccctcctgtggggtgcccatctgtgcctttattccggctgtgccctcgactttccagcttcccatgtttctttggttaggtttctctcccttccttctttctccttccccaatccgcctgtttcgtcagggcccagtttgtttcctcatacaccttcctcactaccccaccccacatggttgactctttccctcagctccaccagctcttcatcatgccactcatttcagaacttgagcaaaacagggcagtcaggatctgatgtctttctggtctccctaagaaaactaagctcttgagggacagcccttggcaatgctttcctatctgctgatcatggtgaccttccttaggacttccagagttcagttccttctggcagagaggttttctttctccatgccatatggatgtgactcaaatgaggggtcccacagcttttcctggctaccacttgctgtgaccttatacatgttggggtttgctcttaaagaggagagcaggaagaaaggttggtttcagaaaccaagagggtcggcagtggacgcgtacattttgtcacggagtccacagagctgagcttttgagcagactctgagaagtatcattgcttgtgttgaaagaatacaacaggatttaagtttctctttagaaattgcactgaagaaaggccgggcgcggtggctccccctgtaatcccagcgctttgggaggccgaggcggggggatcacgaggtcaagagatcgagaccatcctggccaacatggtgaaaccccgtctctaataaaaatacaaaaattagccgggcatggtgacgtgcacctgtagtcccagctactagataggctgaggcaggagaattgcttgaatccgggaggcggaggttgcagtgagccgagatcgtgccactgaactccaacctgccaatagagcgagactccgtctcaaaaaaaaaaaaaaaaaagaaagaaatagcattgaagaaaataccgcacatcagaggaaagcttattttctgcatggtgtcttttcaaagatagaatatttgaagcatgttttctagcgattgtgtggatgagggtgagctggctgaggcatcgctcaagctggggggtggtgtgtaagaagcacgtggagccacaagaggcacctcctatagtcagctaagggcttccctttctgcgcccagcttttgggtgaagggtgatttctattagacacatctgtgcttcagtcatagatgttaatagaggaagcagttttcctgctgcagattcctgaatagagttgctgaaagagtctacttctggactcaggggaagttgaaggccagtctgtgtagaaaggctgaggcaacggggaaagacctgacagctagttacatacgctctgacatagtgctcccatgatggcttccagtgacacatgtgctgatagaattctaaacctctggaatttccctgctggcgacttctatggccgttgactgtacagggtaacctgatgccagatgctatgggcgtgatgagaactagagcattgcagcatggaggaaactgtgaggcaccagatcctgtgcttctgcaggccattttctgaaaacccctgttaggaaggttggatttggcgtgacttgcttgagcaagagtcctggggagagattttgaggtttaatttaacggtatatccagagctaacagtgactcaactcgtctagttctgcaagtcagatgtacacttagagtctctctgtgaagggtttgggtctgagctgtatagtatgtcaaactgccagtaagccagcccctcaccctctgatagatattcctttaatgcaccagacttcgtgtttgataaatgattaatggttgaaattgtttctcttcttttgtgttttcccagttaatagatggtcactgtttccacaatgttttatactttcagctttttgtaacttaactataattacttaattttatttttttaaagcttgttgtggtctaatgagaagtatttttcagtgcataatgtttttctgagcttctgtaaatgccatcccaatgtggtttggttttgttgaacagaaaccaaaataaatttcaaaatgttaaagcaaaaaaaaaaaaaaaaaaaaaaaa

SEQ ID NO: 270 - DNA, 553 bp, Homo sapiens
  CDS (32)..(493)
gggcgagcatctcgcaggccgtaggaggaagatggcggtggagtcgcgcgttacccaggaggaaattaagaaggagccagagaaaccgatcgaccgcgagaagacatgcccactgttgctacgggtcttcaccaccaataacggccgccaccaccgaatggacgagttctcccggggaaatgtaccgtccagcgagttgcagatctacacttggatggatgcaaccttgaaagaactgacaagcttagtaaaagaagtctacccagaagctagaaagaagggcactcacttcaattttgcaatcgtttttacagatgttaaaagacctggctatcgagttaaggagattggcagcaccatgtctggcagagaggggactgatgattccatgaccctgcagtcgcagaagttccagataggagattacttggacatagcaattacccctccaaatcgggcaccacctccttcagggcgcatgagaccatattaaattctatttactatttgttgaatttatttttccgtcagttatgtaaaataaacatactct

SEQ ID NO: 271 - protein, 153 aa, Homo sapiens [sequence omitted]

SEQ ID NO: 272 - DNA, 1854 bp, Homo sapiens
  CDS (332)..(1618)
acaggcattttccaaaggcaagcctggagcgcacggatctgtataaccgcggaaggccctgtttccggtcccttgcgcctgcgctcttgcagccaagaaggcgggaggctggagtagagggaagcctgcaaccggaagtgaaggcagatttccctccttcgtcgctgttgctgccgccatacgcgctctccctgtttagctcttctgttagaaatagtatctttgttttcctttgctgttcctcaatcccctactcttcaccccttgttttcacctattttgcgagaacccatccagatcccccttcccttcttcccctgccggcccagttatggcagagaacgatgtggacaatgagctcttggactatgaagatgatgaggtggagacagcagctgggggagatggggctgaggcccctgccaagaaggatgtcaagggctcctatgtctccatccacagctctggctttcgtgacttcctgctcaagccagagttgctccgggccattgtcgactgtggctttgagcatccgtcagaagtccagcatgagtgcatccctcaggccattctgggaatggatgtcctgtgccaggccaagtcgggcatgggaaagacagcagtgtttgtcttggccacactgcaacagctggagccagttactgggcaggtgtctgtgctggtgatgtgtcacactcgggagttggcttttcagatcagcaaggaatatgagcgcttctctaaatacatgcccaatgtcaaggttgctgttttttttggtggtctgtctatcaagaaggatgaagaggtgctgaagaagaactgcccgcatatcgtcgtggggactccaggccgtatcctagccctggctcgaaataagagcctcaacctcaaacacattaaacactttattttggatgaatgtgataagatgcttgaacagctcgacatgcgtcgggatgtccaggaaatttttcgcatgaccccccacgagaagcaggtcatgatgttcagtgctaccttgagcaaagagatccgtccagtctgccgcaagttcatgcaagatccaatggagatcttcgtggatgatgagacgaagttgacgctgcatgggttgcagcagtactacgtgaaactgaaggacaacgagaagaaccggaagctctttgaccttctggatgtccttgagttcaaccaggtggtgatctttgtgaagtctgtgcagcggtgcattgccttggcccagctactagtggagcagaacttcccagccattgccatccaccgtgggatgccccaggaggagaggctttctcggtatcagcagtttaaagattttcaacgacgaattcttgtggctaccaacctatttggccgaggcatggacatcgagcgggtgaacattgcttttaattatgacatgcctgaggattctgacacctacctgcatcgggtggccagagcaggccggtttggcaccaagggcttggctatcacatttgtgtccgatgagaatgatgccaagatcctcaatgatgtgcaggatcgctttgaggtcaatattagtgagctgcctgatgagatagacatctcctcctacattgaacagacacggtagaagactcgcccattttggaatgtgaccgtctgtccttcaggagaggacaccagggtgggggtgaaggagacactactgcccccacccctgacagcccccaccccatggcttccatcttttgcatcaccaccactcctgaacccccatttctgatttgtcagaatttttttttaacaaaactaaaaatgaaacacatgtgtctgtggtatctaaaaaaaaaaaaaaaaaaaaaaaaa

SEQ ID NO: 273 - protein, 428 aa, Homo sapiens
MAENDVDNELLDYEDDEVETAAGGDGAEAPAKKDVKGSYVSIHSSGFRDFLLKPELLRAIVDCGFEHPSEVQHECIPQAILGMDVLCQAKSGMGKTAVFVLATLQQLEPVTGQVSVLVMCHTRELAFQISKEYERFSKYMPNVKVAVFFGGLSIKKDEEVLKKNCPHIVVGTPGRILALARNKSLNLKHIKHFILDECDKMLEQLDMRRDVQEIFRMTPHEKQVMMFSATLSKEIRPVCRKFMQDPMEIFVDDETKLTLHGLQQYYVKLKDNEKNRKLFDLLDVLEFNQVVIFVKSVQRCIALAQLLVEQNFPAIAIHRGMPQEERLSRYQQFKDFQRRILVATNLFGRGMDIERVNIAFNYDMPEDSDTYLHRVARAGRFGTKGLAITFVSDENDAKILNDVQDRFEVNISELPDEIDISSYIEQTR

SEQ ID NO: 274 - DNA, 641 bp, Homo sapiens
  CDS (108)..(488)
gaattcccgtgatagacagactgtccaccatctgaaccttcattcaccaccattcgataacccttcttccgagcctctcctctggtcgcgcggggaggagaggcgagatggcagatgagattgccaaggctcaggtcgctcggcctggtggcgacacgatctttgggaagatcatccgcaaggaaataccagccaaaatcatttttgaggatgaccggtgccttgctttccatgacatttcccctcaagcaccaacacattttctggtgatacccaagaaacatatatcccagatttctgtggcagaagatgatgatgaaagtcttcttggacacttaatgattgttggcaagaaatgtgctgctgatctgggcctgaataagggttatcgaatggtggtgaatgaaggttcagatggtggacagtctgtctatcacgttcatctccatgttcttggaggtcggcaaatgcattggcctcctggttaagcacgttttggggataattttctcttctttagcatgataagttaggcaatttccagtatgttaagtaacacacttatttttcctgtgtatggagagattcaagaaataattttaaacccgctacataataaaagacattgttgcatggaattc

SEQ ID NO: 275 - protein, 126 aa, Homo sapiens; identical to SEQ ID NO: 70

SEQ ID NO: 276 - DNA, 596 bp, Homo sapiens
agggttagaaactaacttcattctttttagaattcaacagttttcctaggtcaccaattccaccttttgttcttattaaggcgcaaagtcacaggacccccttcctgggagtcactgtcattaaatctattgccgtcagctcagcccagggtaggcaaggttcaagaatgggaagtgcttttgtctggggaaacacgcaggtaatgtgatgctaggaaggaggatgtgcaggtgggtgagagcccaggagggagcagctggtgcctgacagggtgagccatcagggctgggcctgggtacagccccaggagaaggagcctgtgcagaagtagcagttcagtggattccacctcctatgtcacaatccagcaggtggccaggactcagcctgggttttaagtgagtaatgccttccctgtctcagagattagctctaacagtgtcactagaggaagccctggcgagggtgggggggcgtagtgtggggacaaggaggccagatagaaagtgctggaatgttctggaacagatctgtttctggaggagaggctgagtatggagagtcaacagaatgtgaccaccttcagagggaggag

SEQ ID NO: 277 - DNA, 737 bp, Homo sapiens
  misc_feature (699)..(699): n is a, c, g, or t
  misc_feature (700)..(700): n is a, c, g, or t
ttttttttggttacggcagcacttttatttttccttacacaatgacgtgttgctggggcctaatgttctcacataacagtagaaaaccaaaatttgttgtcatctctttaaagaatcgagaattgcgtacaaaaaaaaccttacataaattaagaatgaatacatttacaggcgtaaatgcaaaccgcttccaactcaaggcaagttaacagcccacggtgttctggccaaagacatcagctaagaaaggaaactgggtcctacggcttggactttccaaccctgacagacccgcaagacaaaaacaactggtttcttgccagctctagagaaatcccagaacactcagccctgacatgttaataccaaggggaacagttaacttgaatacaaggtcaaaatcagcaacaagttctacaatccagtgctgatatcaaatacaagcttcaaggacaatttcttttcgaaggcttattccagtttcgtgaggctagcatgaggtgtgtgcatttgccaggggcaaatttctattctcaattaacccatgcagcaaatgctacgcatctgctgagtccgtctagaagcatttgcggtggacgatggaggggcccgactcgtcgtacttctgcttgctaatccacatctgcttggaagtggacagtgaggccaggatgggagccgcgatccacactgagtacnnttgcgctctggggtgcgatgatcttgatcttcatggt

SEQ ID NO: 278 - DNA, 514 bp, Homo sapiens
  CDS (23)..(469)
ctttttcgtctgggctgccaacatgccatccagactgaggaagacccggaaacttaggggccacgtgagccacggccacggccgcataggcaagcaccggaagcaccccggcggccgcggtaatgctggtggtctgcatcaccaccggatcaacttcgacaaataccacccaggctactttgggaaagttggtatgaagcattaccacttaaagaggaaccagagcttctgcccaactgtcaaccttgacaaattgtggactttggtcagtgaacagacacgggtgaatgctgctaaaaacaagactggggctgctcccatcattgatgtggtgcgatcgggctactacaaagttctgggaaagggaaagctcccaaagcagcctgtcatcgtgaaggccaaattcttcagcagaagagctgaggagaagattaagagtgttgggggggcctgtgtcctggtggcttgaagccacatggagggagtttcattaaatgctaactacttttaaaaa

SEQ ID NO: 279 - protein, 148 aa, Homo sapiens [sequence omitted]

SEQ ID NO: 280 - DNA, 777 bp, Homo sapiens
gtggaagaacggtctcagaactgttgtttcaatggccatttaagtttagtagtaaaagactggttaatgataacaatgcatcgtaaaaccttcagaaggaaaggagaatgttttgtggaccacttggttttcttttttgcgtgtggcagttttaagttattagtttttaaaatcagtactttttaatggaaacaactggaccaaaaatttgtcacagaattttgagacccattaaaaaagttaaatgagaaaaaaaaaaaaaaaaaaaaaaaaaaaaaaaagaggggggggcgcccggaaaaaacccccccggggggcgcgcccccaacggcgcccccccccttctttgttgtagaagagaggggcccgccacccagtgaggaggggggtatcttataataagtagcaagcaccagcaggcgcgcgcgcgcgctgtcaaaaacaagcagaaacgctgacagtgggagagagaacatcgcctcgctctgacggacatcctctgcggttgaagagggaacagcgcatcaccatttacgggggggggggggagacagacaattgggggcgcgagaaccaaatcccctaccaggagaagtatattattagaccgcccacggggggagaggataacaataattctcttcaggcggatcatacagtgagggcggagacccaacccccgcaccatacgaacacgccgggcctgacaaaaaatatgggcccccccgagcgatgtatttacctgaccacaaatttttcggggcggcgccgacacaa

SEQ ID NO: 281 - DNA, 1662 bp, Homo sapiens
  CDS (118)..(528)
ggtcgttcgttgggcggtgctggtttttcgctcgtcgactgcggctcttcctcgggcagcggaagcggcgcggcggtcggagaagtggcctaaaacttcggcgttgggtgaaagaaaatggcccgaaccaagcagactgctcgtaagtccaccggtgggaaagccccccgcaaacagctggccacgaaagccgccaggaaaagcgctccctctaccggcggggtgaagaagcctcatcgctacaggcccgggaccgtggcgcttcgagagattcgtcgttatcagaagtcgaccgagctgctcatccggaagctgcccttccagaggttggtgagggagatcgcgcaggatttcaaaaccgacctgaggtttcagagcgcagccatcggtgcgctgcaggaggctagcgaagcgtacctggtgggtctgttcgaagataccaacctgtgtgccatccacgctaagagagtcaccatcatgcccaaagacatccagttggctcgccggatacggggagagagagcttaagtgaaggcagtttttatggcgttttgtagtaaattctgtaaaatactttggtttaatttgtgactttttttgtaagaaattgtttataatatgttgcatttgtacttaagtcattccatctttcactcaggatgaatgcgaaaagtgactgttcacagacctcagtgatgtgagcactgttgctcaggagtgacaagttgctaatatgcagaagggatgggtgatacttcttgcttctcatgatgcatgtttctgtatgttaatgacttgttgggtagctattaaggtactagagttgataaatgtgtacagggtccttttgcaataaaactggttatgacttgatccaagtgtttaacaattggggctgttaagtctgaccatacatcactgtgatagaatgtgggctttttcaagggtgaagatacaagtcttaaccacagtgtaacttacagtttcctttaaaaaaaaaaaaagtaaacctggcagctatagaatacactatgtgcatttataatagctattttatatattgtagtatcaacatttttaaattaaatgttttacattcacaagtggtggggagtcttgtcattaaggtgtgtgtaatttagagtccagttggttttcttctgactgcacttgttctcatagtagtaaaatgctatgcgcatttataccttgcataagtcctcattctaccacatgttaaccctctagctgataatgcaaacactaactgggggattttatttataagggctctagaaaaaacgagttattcacaccagcatcatcttaactaacattctgaactagttagtgcagcttttcattgtgttgtgtggttggtctcataactaggttgagtttttctcctctgctgaggaaacagtaccgaagttctttttcttgtggcatttgtattataaaaacttggtgtgggggaggagcacaaaactccagcccactgaacctctgccaattaagatggtgttgggttaggttacatctggttactgtcctgggaaaatcatttttatagagatggccttccaagtggttttaaaatttactgaagtttttaggtcaattatgtatgttgactaaatttacaaataaacttgtttatcc

SEQ ID NO: 282 - protein, 136 aa, Homo sapiens
MARTKQTARKSTGGKAPRKQLATKAARKSAPSTGGVKKPHRYRPGTVALREIRRYQKSTELLIRKLPFQRLVREIAQDFKTDLRFQSAAIGALQEASEAYLVGLFEDTNLCAIHAKRVTIMPKDIQLARRIRGERA

SEQ ID NO: 283 - DNA, 716 bp, Homo sapiens
  CDS (29)..(607)
ttctttctttgctgcgtctactgcgagaatgaagactattctcagcaatcagactgtcgacattccagaaaatgtcgacattactctgaagggacgcacagttatcgtgaagggccccagaggaaccctgcggagggacttcaatcacatcaatgtagaactcagccttcttggaaagaaaaaaaagaggctccgggttgacaaatggtggggtaacagaaaggaactggctaccgttcggactatttgtagtcatgtacagaacatgatcaagggtgttacactgggcttccgttacaagatgaggtctgtgtatgctcacttccccatcaacgttgttatccaggagaatgggtctcttgttgaaatccgaaatttcttgggtgaaaaatacatccgcagggttcggatgagaccaggtgttgcttgttcagtatctcaagcccagaaagatgaattaatccttgaaggaaatgacattgagcttgtttcaaattcagcggctttgattcagcaagccacaacagttaaaaacaaggatatcaggaaatttttggatggtatctatgtctctgaaaaaggaactgttcagcaggctgatgaataagatctaagagttacctggctacagaaagaagatgccagatgacacttaagacctacttgtgatatttaaatgatgcaataaaagacctattgatttggaccttcttctt

SEQ ID NO: 284 - protein, 192 aa, Homo sapiens [sequence omitted]

SEQ ID NO: 285 - DNA, 894 bp, Homo sapiens
gcggcctcccaaagtgctgggattccaggcgtgagccactgcgcccggccagccctgttgtctttcaaagaacctcggccccagtgatggctgatctcactcccactgtctcgtagaattacactccttcctggggatccctcttcctgcagccttgtccttggggagtacagggaagtacctgcagtgaccctgcccccatgaccttggccaggcaggatgattccagagcccgtactgtggggatcctcactgaccagcccagccccatccgcaagccaggctgggcctgggcataacttcgctgggctctcccaagaccatcagcagtgcatccagccccctggggcctgggctgctgctggttcttcatcagtcccttggtctctagcctcggccagggctgctctgctctccgccctcctttgtgtatcaagtgtcgctcacagccccattcactggggagcctttcggatctatttggtctttctcatgtcccccactggtctgtaccccagggagcgggtgcttgtactgtgtgaatccagtgttcacattcacacttaatgacttccttggcaccaatcatgtatttcaccgtttgcactttttgtatttcaataaccaatgttgatgcaaaactgctataaaactgaccactacgatacacacagaaactcgaaacctctgcaggcgacccctatattctccggggtgtgggcgaaacaagaggaggcgtctagtgaaccgtgcccgacactgttgcacacaggcgcttcccgtgacccccagtgtttcttgtctcccatgcgcggtgagaactcggcgggaccccccctatagaggcgaggcacgaatgatcattggaaactaaccccgggttacccgggttga

SEQ ID NO: 286 - DNA, 866 bp, Homo sapiens
  misc_feature (76)..(76): n is a, c, g, or t
gaagatgagtggggtaaaaccccagacgccatgaaagctgccatggccctggagaaaaagctgaaccaggcccttntggatcttcatgccctgggttctgcccgcacggacccccatctctgtgacttcctggagactcacttcctagatgaggaagtgaagcttatcaagaagatgggtgaccacctgaccaacctccacaggctgggtggcccggaggctgggctgggcgagtatctcttcgaaaggctcactctcaagcacgactaagagccttctgagcccagcgacttctgaagggccccttgcaaagtaatagggcttctgcctaagcctctccctccagccaataggcagctttcttaactatcctaacaagccttggaccaaatgggaaataaagctttttgatccaagaagaaaaaaaaaagaagaaaaacaaaagaaaaacatgtgtgtggggaaggagcaccggggccctggagaacaaggtttcagaagaacacacagtcgcggttggggcgggcgcggggacccaggaggggaacagggagacctggtggcgacaaacaaagcgcgggggtcccccaagagggaaacacaaccgcggggacacagagaccaaacagggggccacgggggaatttcctcacagcagatgtatagagaaaaaagcgagccgtcgggtgggtgaacaacacgcggaagcagagtttttgtgggaaaaaaaaaatttctgcaaaagatgatgagagaaatatcgcaagaaggggcgcacaaaaaaggggggggagagataataatacagagaggagggaggtttcaacagggggggaaaacctgagaagaaattaacaattttgagc

SEQ ID NO: 287 - DNA, 1096 bp, Homo sapiens
gccctcccctcttcatatagtggtctacatggcaactgtgaggaggggagattcagtgtggtgggggactgagtgtggcaggactccccagcagtgagggtctctctcttcctacttgtgctcttgctggggctggtggtccagggtcttactcctatggaggccatgtgggccatgaggtccaccaccctgttgctgtagccaaattcgttgtcataccaggaaatgagcttgacaaagtggtcgttgagggcaatgccaggccccagcgtcaaaggtggaggagtgggtgtctgctgttgaagtcagaggagaccacctggtgctcagtgtagcccaggatgcccttgagggggccctccgacgcctgcttcaacaccttcttgatagtcatcataataatggcaggttattctagaaggaaggtcaggtccaccactgacaacgttggccagtggggacaacagaaggccatgccagatgagcatcccgtacagactcagggatgaaccattggcacacaccagccttggcaagcgcccagtagaggcagggatgatgttctcggagagccccgcggcaatcacgccacaaatattccggagggggcatccaacaagtcttctgggtggcaagtgatggcatggactggggttcctgagttcctatgcaacggaaaccaaagttgtcgagtggatgaccttgaacagagggtggtaagcagaggtggtgcaaggagggactttgagtgatgacgctagaggatgttgtaatacatactcatggatacaaccatacgaacatagggggatcacgcgaaggggccacataagacccctgaggacacccaggcaatagccccaacgctcacggaggagaccagaggaaccaaaagtgccgggcgaatgacaagataaaaaggacccgaacggaatagagggagcaagagaaggaccgaagacaaaggacgcgaagcgaggggacacgacacgacagagggacaaagggtagacaaacgaaagtaagcgagagcgaacagaagaccaacaagtaacaggacgaaaggacagaacaagagaaagcacgccacgaccac

SEQ ID NO: 288 - DNA, 841 bp, Homo sapiens
ttttttttttcgttttttttttttttttttttttttgttttttaaggtgtgcacttttattcaactggtctcaagtcagtgtacaggtaagccctggctgcctccacccactcccagggagaccaaaagccttcatacatctcaagttgggggacaaaaaagggggaagggggggcacgaaggctcatcattcaaaatacaacaaaataaaaaagtattaaggcgaagattaaaaaaattttgcattacataatttacacgaaagcaatgctatcacctcccctgtgtggacttgggagaggactgggccattctccttagagagaagtggggtggcttttaggatggcaagggacttcctgtaacaacgcatctcatatttggaatgactattaaaaaaacaacaatgtgcaatcaaagtcctcggccacattgtgaactttgggggatgctcgctccaaccgactgctgtcaccttcaccgttccagtttttaaatcctgagtcaagccaaaaaaaaacaaatatcccaagctattccgacaaaaccattaaagccttgccaatctcctcttgttttccgccgcagttaggttttgtccagaaagggtgtaaggcaattaggtcacagttccgctaaaaacctttgggctggaccatggagggggccgaactgtcaaactccggctggtgatccacatctgctggaaagtggacaccgggcctgttgggacccccgtttccacgggtatcttggccccggggggacattgttctggacccaattgggcggggtccacgggctggattcccttttgaacccgtgggaattccagggcaca

SEQ ID NO: 289 - DNA, 1705 bp, Homo sapiens
  CDS (60)..(827)
gagtcggagcactatccgcttccatccgtcgcgcagaccctgccggagccgctgccgctatggatgatcgagaggatctggtgtaccaggcgaagttggccgagcaggctgagcgatacgacgaaatggtggagtcaatgaagaaagtagcagggatggatgtggagctgacagttgaagaaagaaacctcctatctgttgcatataagaatgtaattggagctagaagagcctcctggagaataatcagcagcattgaacagaaagaagaaaacaagggaggagaagacaagctaaaaatgattcgggaatatcggcaaatggttgagactgagctaaagttaatctgttgtgacatcctggatgtactggacaaacacctcattccagcagctaacactggcgagtccaaggttttctattataaaatgaaaggggactaccacaggtatctggcagaatttgccacaggaaacgacaggaaggaggctgcggagaacagcctagtggcttataaagctgctagtgatattgcaatgacagaacttccaccaacgcatcctattcgcttaggtcttgctctcaatttttccgtattctactacgaaattcttaattcccctgaccgtgcctgcaggttggcaaaagcagcttttgatgatgcaattgcagaactggatacgctgagtgaagaaagctataaggactctacacttatcatgcagttgttacgtgataatctgacactatggacttcagacatgcagggtgacggtgaagagcagaataaagaagcgctgcaggacgtggaagacgaaaatcagtgagacataagccaacaagagaaaccatctctgaccaccccctcctccccatcccaccctttggaaactccccattgtcactgagaaccaccaaatctgacttttacatttggtctcagaatttaggttcctgccctgttggttttttttttttttttttttaaacagttttcaaaagttcttaaaggcaagagtgaatttctgtggattttactggtcccagcttttaggttctttaagacactaacaggactacatagaggctttttcagcattactgtgtcgtctccgtgccagatgtggcaagatcaccattagcaaatggaaattacatttgaaagccattagacttataggtgatgcaagcatctaagagagaggttaatcacactatagaggcaataagtggtatcagttttcatttttctaattgtttaaactgtgttttataccagtgtttgcaagtaattgggtgttagcttgagatggttaaaggtggtttggggagggacttcgttgtaatggttttgctgttgctgaaaagcatggtgctggtaacagttcaacaatccgtggctgctcattcttgcctactttactctcccactgaagcaggttagctgttgaaggtggtatggaaaagcctgcatgcctgttcaattcttttgtttcttctccttccccctccccctacctccttcccctcactcctcccctccttcgctcgctcaacctcttttgttcagtatgtgtaacttgaagctaatttgtactactggatatctgactggagccacagatacagaatctgtattgttcttactgaaacacagcatggaattaacattaaacttaaataaaacaaacctaaattaaaaaaa

SEQ ID NO: 290 - protein, 255 aa, Homo sapiens
MDDREDLVYQAKLAEQAERYDEMVESMKKVAGMDVELTVEERNLLSVAYKNVIGARRASWRIISSIEQKEENKGGEDKLKMIREYRQMVETELKLICCDILDVLDKHLIPAANTGESKVFYYKMKGDYHRYLAEFATGNDRKEAAENSLVAYKAASDIAMTELPPTHPIRLGLALNFSVFYYEILNSPDRACRLAKAAFDDAIAELDTLSEESYKDSTLIMQLLRDNLTLWTSDMQGDGEEQNKEALQDVEDENQ

SEQ ID NO: 291 - DNA, 1851 bp, Homo sapiens
  CDS (81)..(935)
ggcacgaggcggagcagagacaggccctcggggtggaggtctttggtttcataagagcctgagagagatttttctaagatatgtgtaacacaccaacgtactgtgacctaggaaaggctgctaaggatgtcttcaacaaaggatatggctttggcatggtcaagatagacctgaaaaccaagtcttgtagtggagtgatggaattttctacttctggtcatgcttacactgatacagggaaagcatcaggcaacctagaaaccaaatataaggtctgtaactatggacttaccttcacccagaaatggaacacagacaatactctagggacagaaatctcttgggagaataagttggctgaagggttgaaactgactcttgataccatatttgtaccgaacacaggaaagaagagtgggaaattgaaggcctcctataaacgggattgttttagtgttggcagtaatgttgatatagatttttctggaccaaccatctatggctgggctgtgttggccttcgaagggtggcttgctggctatcagatgagttttgacacagccaaatccaaactgtcacagaataatttcgccctgggttacaaggctgcggacttccagctgcacacacatgtgaacgatggcactgaatttggaggttctatctaccagaaggtgaatgagaagattgaaacatccataaaccttgcttggacagctgggagtaacaacacccgttttggcattgctgctaagtacatgctggattgtagaacttctctctctgctaaagtaaataatgccagcctgattggactgggttatactcagacccttcgaccaggagtcaaattgactttatcagctttaatcgatgggaagaacttcagtgcaggaggtcacaaggttggcttgggatttgaactggaagcttaatgtggtttgaggaaagcatcagatttgtccctggaagtgaagagaaatgaacccactatgttttggccttaaaattcttctgtgaaatttcaaaagtgtgaactttttattcttccaaagaattgtaatcctccccacactgaagtctaggggttgcgaatccctcctgagggagatgcttgaaggcatgcctggaagttgtcatgtttgtgccacgtttcagttcagttctgaagtgttattaaatgtgttcctcagcgacagtgtagcgtcatgttagaggagacgatctgacccaccagtttgtacatcacgtcctgcatgtcccacaccattttttcatgaccttgtaatatactggtctctgtgctatagtggaatctttggttttgcatcatagtaaaataaaataaacccatcacatttggaacataaaaaaaaaaaaaaaaaaaactcgaactagtctctctctctcaatggcgtcagttggtgagtgtccggccccagtaccagtgaaggacaagaaacttctggaggtcaaactgggggagctgccaagctggatcttgatgcgggacttcagtcctagtggcattttcggagcgtttcaaagaggttactaccggtactacaacaagtacatcaatgtgaagaaggggagcatctcggggattaccatggtgctggcatgctacgtgctctttagctactccttttcctacaagcatctcaagcacgagcggctccgcaaataccactgaagaggacacactctgcacccccccaccccacgaccttggcccgagcccctccgtgaggaacacaatctcaatcgttgctgaatcctttcatatcctaataggaattaacctccaaataaaacatgactggtacgtgaaaaaaaaaaaaaaaaaaa

SEQ ID NO: 292 - protein, 284 aa, Homo sapiens
MCNTPTYCDLGKAAKDVFNKGYGFGMVKIDLKTKSCSGVMEFSTSGHAYTDTGKASGNLETKYKVCNYGLTFTQKWNTDNTLGTEISWENKLAEGLKLTLDTIFVPNTGKKSGKLKASYKRDCFSVGSNVDIDFSGPTIYGWAVLAFEGWLAGYQMSFDTAKSKLSQNNFALGYKAADFQLHTHVNDGTEFGGSIYQKVNEKIETSINLAWTAGSNNTRFGIAAKYMLDCRTSLSAKVNNASLIGLGYTQTLRPGVKLTLSALIDGKNFSAGGHKVGLGFELEA

SEQ ID NO: 293 - DNA, 890 bp, Homo sapiens
  CDS (31)..(831)
tttcctttctctctcctcccgccgcccaagatgccgaaaggaaagaaggccaagggaaagaaggtggctccggccccagctgtcgtgaagaagcaggaggctaagaaagtggtgaatcccctgtttgagaaaaggcctaagaattttggcattggacaggacatccagcccaaaagagacctcacccgctttgtgaaatggccccgctatatcaggttgcagcggcagagagccatcctctataagcggctgaaagtgcctcctgcgattaaccagttcacccaggccctggaccgccaaacagctactcagctgcttaagctggcccacaagtacagaccagagacaaagcaagagaagaagcagagactgttggcccgggccgagaagaaggctgctggcaaaggggacgtcccaacgaagagaccacctgtccttcgagcaggagttaacaccgtcaccaccttggtggagaacaagaaagctcagctggtggtgattgcacacgacgtggatcccatcgagctggttgtcttcttgcctgccctgtgtcgtaaaatgggggtcccttactgcattatcaagggaaaggcaagactgggacgtctagtccacaggaagacctgcaccactgtcgccttcacacaggtgaactcggaagacaaaggcgctttggctaagctggtggaagctatcaggaccaattacaatgacagatacgatgagatccgccgtcactggggtggcaatgtcctgggtcctaagtctgtggctcgtatcgccaagctcgaaaaggcaaaggctaaagaacttgccactaaactgggttaaatgtacactgttgagttttctgtacataaaaataattgaaataatacaaattttccttc

SEQ ID NO: 294 - protein, 266 aa, Homo sapiens [sequence omitted]

SEQ ID NO: 295 - DNA, 1793 bp, Homo sapiens
  CDS (74)..(1201)
cgcgtccgccccgcgagcacagagcctcgcctttgccgatccgccgcccgtccacacccgccgccagctcaccatggatgatgatatcgccgcgctcgtcgtcgacaacggctccggcatgtgcaaggccggcttcgcgggcgacgatgccccccgggccgtcttcccctccatcgtggggcgccccaggcaccagggcgtgatggtgggcatgggtcagaaggattcctatgtgggcgacgaggcccagagcaagagaggcatcctcaccctgaagtaccccatcgagcacggcatcgtcaccaactgggacgacatggagaaaatctggcaccacaccttctacaatgagctgcgtgtggctcccgaggagcaccccgtgctgctgaccgaggcccccctgaaccccaaggccaaccgcgagaagatgacccagatcatgtttgagaccttcaacaccccagccatgtacgttgctatccaggctgtgctatccctgtacgcctctggccgtaccactggcatcgtgatggactccggtgacggggtcacccacactgtgcccatctacgaggggtatgccctcccccatgccatcctgcgtctggacctggctggccgggacctgactgactacctcatgaagatcctcaccgagcgcggctacagcttcaccaccacggccgagcgggaaatcgtgcgtgacattaaggagaagctgtgctacgtcgccctggacttcgagcaagagatggccacggctgcttccagctcctccctggagaagagctacgagctgcctgacggccaggtcatcaccattggcaatgagcggttccgctgccctgaggcactcttccagccttccttcctgggcatggagtcctgtggcatccacgaaactaccttcaactccatcatgaagtgtgacgtggacatccgcaaagacctgtacgccaacacagtgctgtctggcggcaccaccatgtaccctggcattgccgacaggatgcagaaggagatcactgccctggcacccagcacaatgaagatcaagatcattgctcctcctgagcgcaagtactccgtgtggatcggcggctccatcctggcctcgctgtccaccttccagcagatgtggatcagcaagcaggagtatgacgagtccggcccctccatcgtccaccgcaaatgcttctaggcggactatgacttagttgcgttacaccctttcttgacaaaacctaacttgcgcagaaaacaagatgagattggcatggctttatttgttttttttgttttgttttggttttttttttttttttggcttgactcaggatttaaaaactggaacggtgaaggtgacagcagtcggttggagcgagcatcccccaaagttcacaatgtggccgaggactttgattgcacattgttgtttttttaatagtcattccaaatatgagatgcattgttacaggaagtcccttgccatcctaaaagccaccccacttctctctaaggagaatggcccagtcctctcccaagtccacacaggggaggtgatagcattgctttcgtgtaaattatgtaatgcaaaatttttttaatcttcgccttaatacttttttattttgttttattttgaatgatgagccttcgtgcccccccttccccctttttgtcccccaacttgagatgtatgaaggcttttggtctccctgggagtgggtggaggcagccagggcttacctgtacactgacttgagaccagttgaataaaagtgcacacctta

SEQ ID NO: 296 - protein, 375 aa, Homo sapiens
MDDDIAALVVDNGSGMCKAGFAGDDAPRAVFPSIVGRPRHQGVMVGMGQKDSYVGDEAQSKRGILTLKYPIEHGIVTNWDDMEKIWHHTFYNELRVAPEEHPVLLTEAPLNPKANREKMTQIMFETFNTPAMYVAIQAVLSLYASGRTTGIVMDSGDGVTHTVPIYEGYALPHAILRLDLAGRDLTDYLMKILTERGYSFTTTAEREIVRDIKEKLCYVALDFEQEMATAASSSSLEKSYELPDGQVITIGNERFRCPEALFQPSFLGMESCGIHETTFNSIMKCDVDIRKDLYANTVLSGGTTMYPGIADRMQKEITALAPSTMKIKIIAPPERKYSVWIGGSILASLSTFQQMWISKQEYDESGPSIVHRKCF

SEQ ID NO: 297 - DNA, 596 bp, Homo sapiens
  CDS (77)..(463)
ttttccggtgcacgcgagtgcttctgaaacgtcagctgcgctcccctaggagtgctgagcccgcggaaccgcagccatgactgaggctgatgtgaatccaaaggcctatccccttgctgatgcccacctcaccaagaagctactggacctcgttcagcagtcatgtaactataagcagcttcggaaaggagccaatgaggccaccaaaaccctcaacaggggcatctctgagttcatcgtgatggctgcagacgccgagccactggagatcattctgcacctgccgctgctgtgtgaagacaagaatgtgccctacgtgtttgtgcgctccaagcaggccctggggagagcctgtggggtctccaggcctgtcatcgcctgttctgtcaccatcaaagaaggctcgcagctgaaacagcagatccaatccattcagcagtccattgaaaggctcttagtctaaacctgtggcctctgccacgtgctccctgccagcttcccccctgaggttgtgtatcatattatctgtgttagcatgtagtattttcagctactctctattgttataaaatgtagtactaaatctggtttctgga

SEQ ID NO: 298 - protein, 128 aa, Homo sapiens
MTEADVNPKAYPLADAHLTKKLLDLVQQSCNYKQLRKGANEATKTLNRGISEFIVMAADAEPLEIILHLPLLCEDKNVPYVFVRSKQALGRACGVSRPVIACSVTIKEGSQLKQQIQSIQQSIERLLV

SEQ ID NO: 299 - DNA, 1228 bp, Homo sapiens
aaaaaaaaaaaaaaaaaaaaaaaaaaaaaaaaaaaaaaaaaaaaaaaaatctctctgctcctcctgttcgacagtcagccgcatcttcttttgcgtcgccagccgagccacatcgctcagacaccatggggaaggtgaaggtcggagtcaacggatttggtcgtattgggcgcctggtcaccagggctgcttttaactctggtaaagtggatattgttgccatcaatgaccccttcattgacctcaactacatggtttacatgttccaatatgattccacccatggcaaattccatggcaccgtcaaggctgagaacgggaagcttgtcatcaatggaaatcccatcaccatcttccaggagcgagatccctccaaaatcaagtggggcgatgctggcgctgagtacgtcgtggagtccactggcgtcttcaccaccatggagaaggctggggctcatttgcaggggggagccaaaagggtcatcatctctgccccctctgctgatgcccccatgttcgtcatgggtgtgaaccatgagaagtatgacaacagcctcaagatcatcagcaatgcctcctgcaccaccaactgcttagcacccctggccaaggtcatccatgacaactttggtatcgtggaaggactcatgaccacagtccatgccatcactgccacccagaagactgtggatggcccctccgggaaactgtggcgtgatggccgcggggctctccagaacatcatccctgcctctactggcgctgccaaggctgtgggcaaggtcatccctgagctgaacgggaagctcactggcatggccttccgtgtccccactgccaacgtgtcggtggtggacctgacctgccgtctagaaaaacctgccaaatatgatgacatcaagaaggtggtgaagcaggcgtcggagggccccctcaagggcatcctgggctacactgagcaccaggtggtctcctctgacttcaacagcgacacccactcctccacctttgacgctggggctggcattgccctcaacgaccactttgtcaagctcatttcctggtatgacaacgaatttggccacactcagtcccccaccacactgaatctcccctcctcacagttgccatgtagaccccttgaagaggggaggggcctagggagccgcaccttgtcatgtaccatcaataaagtaccctgtgctcaaccaaaaaaaaaaaaaaaaaa

SEQ ID NO: 300 - DNA, 1478 bp, Homo sapiens
  CDS (159)..(965)
gcgggcgacacgagggccgcggtgcagtgtccgacccgagagttgcggcctgagtcaccggccccgccctccggagccggacgctccgggaggcccgggagcggcagtggaaccgactcccagaactccggacgtgtgcggcgcagtgagtcgcagccatgttcctggttaactcgttcttgaagggcggcggcggcggcggcgggggaggcgggggcctgggtgggggcctgggaaatgtgcttggaggcctgatcagcggggccgggggcggcggcggcggcggcggcggcggcggcggtggtggaggcggcggtggcggtggaacggccatgcgcatcctaggcggagtcatcagcgccatcagcgaggcggctgcgcagtacaacccggagcccccgcccccacgcacacattactccaacattgaggccaacgagagtgaggaggtccggcagttccggagactctttgcccagctggctggagatgacatggaggtcagcgccacagaactcatgaacattctcaataaggttgtgacacgacaccctgatctgaagactgatggttttggcattgacacatgtcgcagcatggtggccgtgatggatagcgacaccacaggcaagctgggctttgaggaattcaagtacttgtggaacaacatcaaaaggtggcaggccatatacaaacagttcgacactgaccgatcagggaccatttgcagtagtgaactcccaggtgcctttgaggcagcagggttccacctgaatgagcatctctataacatgatcatccgacgctactcagatgaaagtgggaacatggattttgacaacttcatcagctgcttggtcaggctggacgccatgttccgtgccttcaaatctcttgacaaagatggcactggacaaatccaggtgaacatccaggagtggctgcagctgactatgtattcctgaactggagccccagacccgccccctcaccgccttgctataggagtcacctggagcctcggtctctcccagggccgatcctgtctgcagtcacatctttgtggggcctgctgacccacaagcttttgttctctcagtacttgttacccagcttctcaacatccagggcccaatttgccctgcctggagttccccctggctctaggacactctaacaagctctgtccacgggtctccccattcccaccaggccctgcacacacccactccgtaacctctcccctgtacctgtgccaagcctagcacttgtgatgcctccatgccccgagggcctctctcagttctgggaggatgactccagtccctgcacgccctggcacacccttcacggttgctacccaggcggccaagctccagaccgtgccagacccaggtgccccagtgcctttgtctatattctgctcccagcctgccaggccaggaggaaataaacatgccccagttgctgatctctaa

SEQ ID NO: 301 - protein, 268 aa, Homo sapiens
MFLVNSFLKGGGGGGGGGGGLGGGLGNVLGGLISGAGGGGGGGGGGGGGGGGGGGGTAMRILGGVISAISEAAAQYNPEPPPPRTHYSNIEANESEEVRQFRRLFAQLAGDDMEVSATELMNILNKVVTRHPDLKTDGFGIDTCRSMVAVMDSDTTGKLGFEEFKYLWNNIKRWQAIYKQFDTDRSGTICSSELPGAFEAAGFHLNEHLYNMIIRRYSDESGNMDFDNFISCLVRLDAMFRAFKSLDKDGTGQIQVNIQEWLQLTMYS

SEQ ID NO: 302 - DNA, 857 bp, Homo sapiens
  CDS (103)..(591)
cttgcgtccccgcgtgtgtgcgcctaatctcaggtggtccacccgagaccccttgagcaccaaccctagtcccccgcgcggccccttattcgctccgacaagatgaaagaaacaatcatgaaccaggaaaaactcgccaaactgcaggcacaagtgcgcattggtgggaaaggaactgctcgcagaaagaagaaggtggttcatagaacagccacagcagatgacaaaaaacttcagttctccttaaagaagttaggggtaaacaatatctctggtattgaagaggtgaatatgtttacaaaccaaggaacagtgatccactttaacaaccctaaagttcaggcatctctggcagcgaacactttcaccattacaggccatgctgagacaaagcagctgacagaaatgctacccagcatcttaaaccagcttggtgcggatagtctgactagtttaaggagactggccgaagctctgcccaaacaatctgtggatggaaaagcaccacttgctactggagaggatgatgatgatgaagttccagatcttgtggagaattttgatgaggcttccaagaatgaggcaaactgaattgagtcaacttctgaagataaaacctgaagaagttactgggagctgctattttatattatgactgctttttaagaaatttttgtttatggatctgataaaatctagatctctaatatttttaagcccaagccccttggacactgcagctcttttcagtttttgcttatacacaattcattctttgcagctaattaagccgaagaagcctgggaatcaagtttgaaacaaagattaataaagattaataaagttctttgcctagt

SEQ ID NO: 303 - protein, 162 aa, Homo sapiens
MKETIMNQEKLAKLQAQVRIGGKGTARRKKKVVHRTATADDKKLQFSLKKLGVNNISGIEEVNMFTNQGTVIHFNNPKVQASLAANTFTITGHAETKQLTEMLPSILNQLGADSLTSLRRLAEALPKQSVDGKAPLATGEDDDDEVPDLVENFDEASKNEAN

SEQ ID NO: 304 - DNA, 1315 bp, Homo sapiens
  CDS (207)..(515)
gcggcaggtgagtagctgtgcgaattcggttctctagggaactccttcttcgcctgctggccttacctgggctccccgcttctctggaggggaggcggtgcgggaactcccgtaggcgtgagctggagcgcgcgcccgctgctctctccaggtcccgccgcgccagttcgcctccgcaaagcccgtccctctcttccgcaggcaccatgttcctgactgcgctcctctggcgcggccgcattcccggccgtcagtggatcgggaagcaccggcggccgcggttcgtgtcgttgcgcgccaagcagaacatgatccgccgcctggagatcgaggcggagaaccattactggctgagcatgccctacatgacccgggagcaggagcgcggccacgccgcggtgcgcaggagggaggccttcgaggccataaaggcggccgccacttccaagttccccccgcatagattcattgcggaccagctcgaccatctcaatgtcaccaagaaatggtcctaatcctgagtcgtcacccttggattttatggatcacggagctgaccatctttacctggtcctggaactgaaaaactgtagcttgtgtgaaaatgagcctttggaccagtctttattaaaacaaacaaacatgagtagtctgcatatcgaatatctagagctctaaaccccccaatacttaaaagtctaattgctgtcctgtggtttcattagtctgataggaagatagggatttcctcagtcacagatgatattttgaaggaaagctgcaataaagccacaatgatttgaggtctttgcttaagtatgagatacttgatgggggctttatcatgcaacattagtttgcttaccttaagaattgcccaaaaatgaaagaaaatatgagcttttcagttaaacatactcctaaaaacattttccgggattttactactaaaattggacatttaagcgaagtaaaagaggccgggtgcggtggctcacgcctgtaatcccaacactttaggagtccaaggcgggcggatcacttgaggtcaggagttcaagaccagcttggccaaggtgataaaacccgtctctactaatacaaaaaaaattagctgggtatgttggtgcaggcttgcaatcccagctacttgggacgctgaggtgggaggatcgcctgaacctcagaggcagaggttgcaatgaagcggaggttgcagtgagccgagagcatgccgctgcactccagcctgggagactgcatctcaaaaaagaaaaataaacgaagtaaaagatatttatcagaaaaaaaaaaa

SEQ ID NO: 305 - protein, 102 aa, Homo sapiens
MFLTALLWRGRIPGRQWIGKHRRPRFVSLRAKQNMIRRLEIEAENHYWLSMPYMTREQERGHAAVRRREAFEAIKAAATSKFPPHRFIADQLDHLNVTKKWS

SEQ ID NO: 306 - DNA, 679 bp, Homo sapiens
gagtcaacacatctttattaaacacctgaagttactgggaggaggccatgatgctggacacactgtcaaagtcaatcttctccacaatgttcttgggtttaatgctctcttcttggctacagatgaagatctgccccgactcgtcggcactccagccgtatttgctcatccacacctttagctggctgtccgacagatccccgagcatctcggccagcagccagcggtcaatgtgctggtaagtgatacccacaacatggcagataaactttcggacagagtcttcaaagccagttataccttccaagaggtccatgttttcatccagggcttgccagaaggcctggaaatggcaggtctccagcaggtccccgaggtacaaaatctgtcggattggccgttcttcttgatgtgcctggtcgatcatgcacttgcacagggtgaagtctgtgtgcggcaagttggtgagggccttcagcaggatctgggcggtgaccgtggtctgaaagaaggctgggttgaactggtacagcttcaggacagccaggttggcttccagatcataggcattttccttggcctgcgtctctacatagcgctccagggtggccaggttctcaggattgtacctgtcgatacccttgagcaacttgcccacgtttgctctcatctgctcaaa

SEQ ID NO: 307 - DNA, 2051 bp, Homo sapiens
  CDS (262)..(1323)
tcatttcatgttatgttttcatttcccctctgtctgagagattgctctgatgtctttccttccataagtcctacggagatcgagcttacctcatttttctcccaggcctaggagctcaattaccaggatcactttcttccccagggtgtactacagacctccacatgttggacagtaggattcagcagagaatgagtcccacatcctcttttcatccataagccactcttcccaactactcttccgccttccattgtccctatgtctactttactgctcaatctggattttggggaacctcctcccaaaaaggcattagaaggaaatgccaagcaccgaaattttgtcaagaagcggaggctcttagaacggagaggctttctgagtaaaaagaaccaaccccctagcaaggcgcctaagttgcactctgaaccttcaaagaaaggggagactcctacggtcgatggcacttggaagaccccttccttcccaaaaaagaagacagctgcttccagcaatgggtcaggacagcccctggacaagaaagctgcagtgtcttggttgacccctgccccttcaaaaaaggctgattctgttgctgctaaagtagatttgctgggggagttccagagtgcccttccaaagatcaatagccacccaacccgctctcagaagaagagctcccagaagaaatcctctaaaaagaaccatcctcagaagaatgccccacagaactccacccaagctcattcagagaataaatgctccggagcatcccagaagttgccacggaagatggtggcaattgactgtgagatggtgggcacaggaccaaaggggcatgttagttccttggctcgatgtagcattgtcaactacaacggagatgtgctttatgacgagtacattcttcccccctgccacattgtggactaccgaaccaggtggagtggtatccggaagcagcacatggtgaatgccacacccttcaagattgctcgaggccagatcttgaagatactcacagggaagatagtggtggggcatgccatccacaacgacttcaaagcccttcagtactttcaccccaaatccctcacccgtgacacctcccatatcccccccctcaaccggaaggctgactgcccggagaatgccaccatgtctctgaagcatctcaccaagaagctgctaaaccgggatatccaggttgggaagagcggacattcctctgtggaagatgcccaggccaccatggagctatataagttggttgaagtcgagtgggaagagcacctagcccggaatccccctacagactagtggcaatggggacgctggtgatatgaggaggcagaggcagcacccaggagaaacagggcagtggaccaatggacagctccaccagctccacatctttggaagctagatttggggagagagaagctctaccccagacttaatacccattgaaatttcacctcaggtgttgtgtcctgtgtctggttaagtgtcccatggaaggggaaagccttcacgtcagaacccaaccctataccttttacttcttaaatggtgctaaccacaggtgtcccagggtgctctgtgccagttaagatttttaactttcaaggggcagggcatactgggaaatgtagtttcccaaactgccttatcacttgggtggacatatgtctccttttatgccttttggtcttgagtaattaacagcatcctcttccacgctcagaagtgttctggttggggccaggcatggtggctcacgcctgtagtcccaacacttagggaggccgaggcgggcggatcacctgagatcaggagttcaagaccagcctggccaacatggcgaattcccgttctctactaaaaatacaaaaaatgtgtggggtgtggtggcaggagcctgtaatcctagctactcaggaggctgaggcaggagaatcgcttgagcccaggaggcggagattgcagtgagccgagatcgtgtcactgcactccagcctgggtgacaagagtgagactccgtctcc

SEQ ID NO: 308 - protein, 353 aa, Homo sapiens
MSTLLLNLDFGEPPPKKALEGNAKHRNFVKKRRLLERRGFLSKKNQPPSKAPKLHSEPSKKGETPTVDGTWKTPSFPKKKTAASSNGSGQPLDKKAAVSWLTPAPSKKADSVAAKVDLLGEFQSALPKINSHPTRSQKKSSQKKSSKKNHPQKNAPQNSTQAHSENKCSGASQKLPRKMVAIDCEMVGTGPKGHVSSLARCSIVNYNGDVLYDEYILPPCHIVDYRTRWSGIRKQHMVNATPFKIARGQILKILTGKIVVGHAIHNDFKALQYFHPKSLTRDTSHIPPLNRKADCPENATMSLKHLTKKLLNRDIQVGKSGHSSVEDAQATMELYKLVEVEWEEHLARNPPTD

SEQ ID NO: 309 - DNA, 4090 bp, Homo sapiens
  CDS (31)..(879)
agtttccgggcccgggctgctctcggagccatgagctgcggccgcccccctcccgacgtggacggcatgatcaccctcaaggtggacaacctgacctaccgcacctctcccgacagcttgaggcgcgtgttcgagaagtacgggcgcgtgggcgacgtgtacatcccgcgggagccccacaccaaggcgccccggggcttcgctttcgtccgctttcacgaccggcgcgacgcccaagacgccgaggccgccatggacggggcggagctggacggacgcgagctgcgggtgcaggtggcgcgctatggccgccgggacctgccccgcagccgccagggagagccacgcggcaggtccagaggcggcggctacggacggcggagccgcagctacgggcggcggagccgcagccccaggcggcgacaccgcagccgatcccggggtcccagctgctccaggtcccgcagccgatctcgctataggggttctcgctatagccggtctccctacagccgatctccttacagccggtcgcgctacagccgctctccctacagcagatctcgctacagggaatctcgctacggcggatctcactacagctcatctggttacagtaactctcgctacagccgatatcacagcagccggtctcactcgaagtctgggtcctccactagctctcgctctgcatcaacctccaaatcgagctctgcgcgacgatccaagtcctcctcggtctccaggtctcgctcgcggtccaggtcttcatctatgaccaggagtcctccccgggtatccaagaggaaatccaagtcaaggtcgcgatccaagaggccccccaagtctcctgaagaggaaggacagatgtcctcttaagaaaatgatgcatcaggaagcaacgtgatggaggacttgggggaaaaggatcacatactcagtctatggaagcaacgtccctggaagaagaggctgcctattgaaaaggttgtgtcacacttttctacctttttgccagtttgaagctttgcatcaggtggcaaaattcattctatgtgccgttttgttgttattcacattttattgtaacttaggaggtgaacgacctaagattacgttattgggtttggatatttgaggcaaaaatttatttttatttctatagtgatgactgttttggtttgaaatgaacagattggtaacctaatttgtggcctcctgacttttaaggaaacgtgtgcagccattacacacagcctaacgctgtcaagacattgcttcaacattgccttcattccttaaaaacctacaaaaggtggtgtaaattaatatggataattttatttacctccaggtctaaaaggtagtgtgacccaaatttgtataaagatttttcatgtgaaaggactggggttttagcaaacacaggtctaatctcttttgtgtttttgtgcaccaggcccggctgcgtagcagttgagtgatgctggttagctattaaggtggcctgttgcagtgcagagtgctgagctgcttcctgttttcttctgattgctcctggggaaaacacgccttgtcctgaagaacaaatggctgtccagtttattaaaatgcctgtcaactgcacttccagtcacccaggccttgcagataaataatggagcatgcagtgagcacatctagctgacgataatcacaccttttcccccgtcttttctgaaaaattgtaaatctgatcatatcaacatgtatgaacttaaaatatggagaatgttatggaagaaatagtttataagtttgttaagtacttataacatggtttatctttttgattattaattttttacgctaaccattgtttctgtagttaaaattgttttcttggtgttatcttttctcagaataaaattagaaacttttgatggaaagtaggttgttttattttctgtatgacttttgaatatttgtacttttgagaaaattattagcaccaagtgtttctcaaaatataatttttaaaaaatccttaaaaaaaaaaaaaaaaaactcgagactagttctctctctcccaaggagaagcagaggatcaccacgctattctccccgtcatagcagatctcgctctcgtacataagatgattggtgacactttttgtagaacccatgttgtatacagttttcctttattcagtacaatcttttcattttttaattcaaactgttttgttcagaatgggctaaagtgttgaattgcattcttgtaatatccccttgctcctaacatctacattcccttcgtgtctttgataaattgtattttaagtgatgtcatagacaggattgtttaaatttagttaactccatactcttcagactgtgatattgtgtaaatgtctatctgccctggtttgtgtgaactgggatgttgggggtgtttgtggttatcttacctggggaagttcttatgtttatcttgcttttcatgtgtctttctgtagacatatctgaagagatggattaagaatgctttggattaaggattgtggagcacatttcaatcattttaggattgtcaaaaggaggattgaggaggatcagatcaataatggaggcaatggtatgactccaagtgctattgtcacagatgaaattggcagtattgaccttatactaaaaggcaggggttaaaaatgattatatacattttccttaaaacacttgcaaacattttattcagttgtctttagctacaattgctttgctttttaaaccttggcaattgtggcaaaattatattgcccattttgtagcaacttattttgctcccttccccccatttttgttttaatagggactaatgtgggaagaactggctaatttgtcacagtgcttagttacaactgttaatgtgtgacctgctgttggtgtacatgtgggtacagggtgtttttaaatccaacaagatagagtataatatcaatactgctaaatctgcatgtcctctgtgtgactgatagagcgttgctatttcatttttttaagacaaaatgaaagcaaaatatagagttccaatgtattggtgtagataatctagttgggaatacttttaagtctcaccttcccctttaaactaatattcataattggttcatatgtttaaaagactttaatttacaaattaaattgcaaatgggagcattagatttagttttagacttaggtgggtagcaatgccagtaaacttaaattacgtaacttcttgcaaccacgaaacctgtaatacgctgtacagtaacaagtgttggcattatcagttgaactgtaaatacaaaatgcttcttccaattagtctctatgatgattaagtttctaaaatttatctgaacaccattcagaaacttgttttggggaatttgatagttattgatgtgcatctgttaaactgatgacagacataactcatcattccccagaaaccttttttgattacagtatctaacattttgcctcctcttttttggttttgctggttataaaggtttggattggagagggctcactggatcccaatccttggagctggatcattggattcaaatcataatgtggataggatagggaggatgaattaccaggattcatggagcgggatcagattaccaggaacataggagtggattcctgccccaaccaaaccgcattcgtgtggatttttttattcaacttaattggctattccaaagattttttttttcctatttttgacgattggagcccttaagatgcacgatggaattgtgttttgcgttttttggtaaaaggagcaaagcgaggacctggagataaacgctggagcaatctccttggaaggattcagcacgagtagatggtaaacatttaaaggggaaagggggggtttgtttaaaatagtaaatcagtaagtcacttctaaatttaaagaaaacaaaattggagttgaagaataagtaggtttccaattggctattgcccgttttttttgaaaaaataaacatttttttaaaaaaaaaaaaaaaaaaaaaaaaaaaaaaaaaaaaaaaaaaaaaaaaaa

SEQ ID NO: 310 - protein, 282 aa, Homo sapiens
MSCGRPPPDVDGMITLKVDNLTYRTSPDSLRRVFEKYGRVGDVYIPREPHTKAPRGFAFVRFHDRRDAQDAEAAMDGAELDGRELRVQVARYGRRDLPRSRQGEPRGRSRGGGYGRRSRSYGRRSRSPRRRHRSRSRGPSCSRSRSRSRYRGSRYSRSPYSRSPYSRSRYSRSPYSRSRYRESRYGGSHYSSSGYSNSRYSRYHSSRSHSKSGSSTSSRSASTSKSSSARRSKSSSVSRSRSRSRSSSMTRSPPRVSKRKSKSRSRSKRPPKSPEEEGQMSS

SEQ ID NO: 311 - DNA, 895 bp, Homo sapiens
ccatttttaaatagttttatttaagacattgcattttctacttacaatacagtgtttataaagtgcaatgttatttcctctcccctgtgcatatgttccatattcaagtattgagaatgcccagtaacttactatagcagcttaactttttaaaactgccacagaatttgctacgaatttagggccttcaaatgttttaaatgtgtggaacaatgctacatctacacttggttggcttaatcaacctcttcaatggtgggccctgaggaagcaccaccagagggaggagctccaccaccaggaaatcccccaggcattcctcctggcatgcctcctgcactctggtacagcttggtgatgatggggttgcaaactttctccagctctttctgttgatgttcaaattcttccttctcggcagtctgattcttatcaagccagttgataatttcattacacttgtccagaatcttctgtttgtcctcatcgttaatcttgccttgaagtttctcatcttcaacagttgctttcatgttgaaggcataggactcaagtgaattcttggatgacaccttgtccctctgcttctcatcttcagctttgttactctcagcttcctggaccatacgttcaatgtcttccttgctcaaacggcccttgtcattagtgatagtgatcttgttctcttttcccggactcttgttcacaagcgagacattgtgggataccattggcaacaatgtcacaagtgacctcaatctagggacaacctggggggggcgggaggttgtccctgtgagttaaaacctgtccaagcgagggtttattcctgtgtcagggcaaggcggccttcaaaatcaccgaaaagaccacccaggtgtgttgttagaatagg

SEQ ID NO: 312 - DNA, 537 bp, Homo sapiens
taacagtctttattgggctcagaccaggagtccgtgggtcttgaggacctctgtgtatttgtcaattttcttctccacgttcttctcggcctgtttccgtagcctcatgagctgtttcttcttccggtagtggatcttggctttctctttcctcttctcctccagggtggctgtcactgcctggtacttccagccaacctcgtgagccatgcgccccagataggcaaactttcttgtaggctccatacgcacgaccttgagggcagcaggaaccaccatccgctttttcttgtcgtagggcggtgggatgccgtcaaacaccttgagacggtccagagctgcctggcctcgcttggttttgtggggcagtatacctcgcacggtccgtcataagatgcggctgtgggccctgaagtggtaggggcctctggaagggctggtcgtcatccgcttgcggatgaaagcctagtacttcatctagtttctcgcgaaagtgccagacatgttgatgtctttccagcgtacgaccaccatctt

SEQ ID NO: 313 - DNA, 546 bp, Homo sapiens; identical to SEQ ID NO: 93
  CDS (22)..(492)

SEQ ID NO: 314 - protein, 156 aa, Homo sapiens [sequence omitted]

SEQ ID NO: 315 - DNA, 464 bp, Homo sapiens
  CDS (9)..(398)
ctcccaagatgtcgttcccaaagtataagccgtcgagcctgcgcactctgcctgagaccctcgacccagccgaatacaacatatctccggaaacccggcgggcgcaagccgagcggttggccataagagcccagctgaaacgagagtacctgcttcagtacaacgatcccaaccgccgagggctcatcgaaaatcctgccttgcttcgttgggcctatgcaagaacaataaatgtctatcctaatttcagacccactcctaaaaactcactcatgggagctctgtgtggatttgggcccctcatcttcatttattatattatcaaaactgagagggataggaaagaaaaacttatccaggaaggaaaattggatcgaacatttcacctctcatattaagtctggcaatgatgactatatgtattcctgcctaaataaatcatctattaatcattaaaaaaaaaa

SEQ ID NO: 316 - protein, 129 aa, Homo sapiens
MSFPKYKPSSLRTLPETLDPAEYNISPETRRAQAERLAIRAQLKREYLLQYNDPNRRGLIENPALLRWAYARTINVYPNFRPTPKNSLMGALCGFGPLIFIYYIIKTERDRKEKLIQEGKLDRTFHLSY

SEQ ID NO: 317 - DNA, 2653 bp, Homo sapiens
  CDS (340)..(1128)
ggcacgagggcagcacggtgcggcgcagctcctgctcgcctttcccttcgctgggcgagaggtgtctatggggcacccgctgccgccgccgctaccgccaccgccaccgccaccgccgccgagtgctgtctctatggcgaggaggaggaggaggagcgcgagctcagcgacacaagtacataaataaaggataaaatattttatgaaacaaatcttcaatcaagtataacattttgatgcttggcatctagactcccttgtgccctcactatgccagcggcaactgtagatcatagccaaagaatttgtgaagtttgggcttgcaacttggatgaagagatgaagaaaattcgtcaagttatccgaaaatataattacgttgctatggacaccgagtttccaggtgtggttgcaagacccattggagaattcaggagcaatgctgactatcaataccaactattgcggtgtaatgtagacttgttaaagataattcagctaggactgacatttatgaatgagcaaggagaataccctccaggaacttcaacttggcagtttaattttaaatttaatttgacggaggacatgtatgcccaggactctatagagctactaacaacatctggtatccagtttaaaaaacatgaggaggaaggaattgaaacccagtactttgcagaacttcttatgacttctggagtggtcctctgtgaaggggtcaaatggttgtcatttcatagcggttacgactttggctacttaatcaaaatcctaaccaactctaacttgcctgaagaagaacttgacttctttgagatccttcgattgttttttcctgtcatttatgatgtgaagtacctcatgaagagctgcaaaaatctcaaaggtggattacaggaggtggcagaacagttagagctggaacggataggaccacaacatcaggcaggatctgattcattgctcacaggaatggcctttttcaaaatgagagaaatgttctttgaagatcatattgatgatgccaaatattgtggtcatttgtatggccttggttctggttcatcctatgtacagaatggcacagggaatgcatatgaagaggaagccaacaagcagtcatgacatgaaatagtccttttatttttatttcgagctacacacatgcttgtatataggttttatctctggttgaatccctcgaacaatagacagtacctttcccccccctttcatggcccattttattgtctgcctttcagtactaagtatgaccgttcctatctcagatcttaataaaaagaaaaaaaaaaacgcattcaggttaaatttggccttaatttaatatacttgttagcaagcgtgtgtgacagagagtggggaaagctacatcattgaatattttgataaactttaccgacttgagtttggtttatttttcccttttcctaaattaactagcactgactgtaatttatttccctgtttcacgtctctcccttccattctgcaggagttttagctatttgagatcgtggaccatcagttttgcactttagagagtgtttctgactctaaacctgttttatcagaaaatttgttttttcttgatcttagctggaaaaatctgccaactttacacagtatttacttggttttgacccacagaatatagcacgttgtgcaaactgtcgattcagcgaaacttaaaaaagacaagaaactactgaggagcttagtaactgctgtttctgtacgtagtgtttaatcttccaagcacatctagtgtctgtcagtttctaattggcatgtgtaggctgctctgtgactgaagaattttcaaaccagctttacacccttcaggaaaaatcccttgtgattggatgtttactatctgccaggaaactggtactcaagatgttgaagctacagttattttatgatagcacacttcccttgatctgcttatttttattccatcaccatttaccctttttttttttttaaattttgtagccattcttatgatgctcttgatttgttggttacacaaatcaattttattaaaaatccaaagataagtctttaggtatattttgtaccaaattaaattagaagacaaaaattgtgctttcatagttgctacaaaggtaaataatggagagatttggtacaaaacaacaaaatatatatatattctcatatatatatatatagctgataaaattacctgaggagtgtaatgcttattttttttgtgtatatctttgcaatctattttatatatattgacaaaagagactgtgaaatacttagccatgcagaatatgtgaccagaccagagcatgtgtaggaagactttacggtaatcattaactctaccccgaaatgatggactacaagttataatgtgtgttacctacacttcaatcagtaatattagcaaatctccaaatgttagtcacattggtttgtctcccttgtacattctttattcatgatattacagtgctgtaactgggtggtcctttttaaacaaaacattatttgcaaaacagagggtattatttgtttttaaagcttttgtaaataaaggcttcaaaatgttttcttataaaaaaaaaaaaaaaaaaaaaaaaaaaaaaaaaaa

SEQ ID NO: 318 - protein, 262 aa, Homo sapiens
MKKIRQVIRKYNYVAMDTEFPGVVARPIGEFRSNADYQYQLLRCNVDLLKIIQLGLTFMNEQGEYPPGTSTWQFNFKFNLTEDMYAQDSIELLTTSGIQFKKHEEEGIETQYFAELLMTSGVVLCEGVKWLSFHSGYDFGYLIKILTNSNLPEEELDFFEILRLFFPVIYDVKYLMKSCKNLKGGLQEVAEQLELERIGPQHQAGSDSLLTGMAFFKMREMFFEDHIDDAKYCGHLYGLGSGSSYVQNGTGNAYEEEANKQS

SEQ ID NO: 319 - DNA, 441 bp, Homo sapiens
tagatgtttacagtgattacatttatctaagcaacatacatacatgttcagttgtaagatgttaactaaatttctgtgacaaatatgctttttttttaataccaagaacattatagagttaatgcagagtcctaaggataatctagtagtcactaagtttttcttaagtcttcactttagatgctgttatttctagcacaattaagcaggcagagtctttcatatgctcaaacactggaatctttggttggttaccatatcagctggcttgcagacaagaagccaaccattttaagaatgttttaagtgaacaacttgcaaaccccagggatggaaaaaccctaagaatgcacaattgtgagcatttaacaaccatcacaactgtggctgaagactgttcatgccgttcttctgaaatagatctcaaagcagtatagttca

SEQ ID NO: 320 - DNA, 1978 bp, Homo sapiens
  CDS (111)..(1370)
cgggggtgcaaccctttgaagtgtcccctcctacttcttgctgcctcacggttgctgttgcagacccaggagtctctgaaggcttccgcggctttggggccggttgtgagatgccaggcagaggccgctgcccggactgcggctccacggagctggtggaagactcgcactattcgcagagccagctggtgtgctccgactgcggctgcgtggtcaccgagggggtccttaccactaccttcagcgacgagggcaatctccgagaggtaacatattcccgaagcacaggggaaaacgaacaagttagtcgcagccagcaacgaggtctccggcgagtgagagacctttgtcgagttctgcagttgccaccaacatttgaggataccgcggttgcctactaccaacaggcatatcggcactctggcatccgagcggccaggctgcaaaagaaggaggtgttggttgggtgctgcgtcttaatcacctgccgacagcataactggcccctaacaatgggggccatctgcacgctgttgtatgcagatttggatgtgttttctagcacttacatgcagatagtgaagctcctgggactggatgtgccatctctgtgcttggcagaactggtgaagacctattgcagcagcttcaaactgttccaagcttcaccttctgtgccagccaaatacgtggaagacaaagagaagatgctgtctcgaacaatgcagttggtggagctggcaaatgagacgtggctggtgaccgggaggcatcccttgcccgtcatcactgctgcgactttcctggcttggcagtcgctgcagcctgcagatcggctttcatgttcccttgcccgattttgtaaattggcaaatgtggacctgccctacccggcgtcctcccgcctgcaggagctgctggctgtgctgctgcggatggctgagcagctggcctggttacgagttctgagacttgacaaacggtctgtggtgaagcacatcggtgaccttctccagcaccgccagtcactggtccgctctgcctttcgggatgggacagcagaagtggagacccgagagaaggagccaccggggtggggacaggggcaaggagaaggggaggtgggaaataattccttaggtttaccccaggggaagcggccggccagtcctgcccttctcttgccaccctgcatgttgaagtccccgaagcggatctgccctgtaccccctgtctccactgtcactggagatgagaacatttctgatagtgaaatagaacagtatttgcgtacccctcaggaagttagggactttcagagagcccaggctgctagacaggctgccacgagtgtccctaaccctccctgatggatatccactgggagcacttcatcctgttctgacagcttgataacattcctgttataaccaaggatggaagtgtacaccagtccgtaggtattgcttttcttgtttgaaggaaccaagaggggctctgccattagttggaccctgggtcctggagtaaagtcaggagtgcagggatgactataggtaggagagattcccatcccttggtgtgggagagcaagttgcctatgtccatgttctgtgagatggctttcctcatagatggatgggaaaatgtcaggctctttgctgctggtttgaattggacacactgctgcggctcctcctgcaggcctgagggggcttccctctgcttgtggagtggttggcattcccagcagtatcaaccctcagaggagcgggaactggggaattctggccctacgtgcattcacaggcaatgatgggtttgtgtgtatggtgtcatgagatcctctacctcataacaaaaggacagtgggtagactaaggcagtagctcaaagggctttgcaaaattttaatatattaaaacaagaggcatctgctagaaaacattctattgtataaaacccgagttcttaaaaa

SEQ ID NO: 321 - protein, 419 aa, Homo sapiens
MPGRGRCPDCGSTELVEDSHYSQSQLVCSDCGCVVTEGVLTTTFSDEGNLREVTYSRSTGENEQVSRSQQRGLRRVRDLCRVLQLPPTFEDTAVAYYQQAYRHSGIRAARLQKKEVLVGCCVLITCRQHNWPLTMGAICTLLYADLDVFSSTYMQIVKLLGLDVPSLCLAELVKTYCSSFKLFQASPSVPAKYVEDKEKMLSRTMQLVELANETWLVTGRHPLPVITAATFLAWQSLQPADRLSCSLARFCKLANVDLPYPASSRLQELLAVLLRMAEQLAWLRVLRLDKRSVVKHIGDLLQHRQSLVRSAFRDGTAEVETREKEPPGWGQGQGEGEVGNNSLGLPQGKRPASPALLLPPCMLKSPKRICPVPPVSTVTGDENISDSEIEQYLRTPQEVRDFQRAQAARQAATSVPNPP

SEQ ID NO: 322 - DNA, 797 bp, Homo sapiens
  CDS (26)..(673)
cttggttccgcgttccctgcacaaaatgcccggcgaagccacagaaaccgtccctgctacagagcaggagttgccgcagccccaggctgagacagggtctggaacagaatctgacagtgatgaatcagtaccagagcttgaagaacaggattccacccaggcaaccacacaacaagcccagctggcggcagcagctgaaattgatgaagaaccagtcagtaaagcaaaacagagtcggagtgaaaagaaggcacggaaggctatgtccaaactgggtcttcggcaggttacaggagttactagagtcactatccggaaatctaagaatatactctttgtcatcacaaaaccagatgtctacaagagccctgcttcagatacttacatagtttttggggaagccaagatcgaagatttatcccagcaagcacaactagcagctgctgagaaattcaaagttcaaggtgaagctgtctcaaacattcaagaaaacacacagactccaactgtacaagaggagagtgaagaggaagaggtcgatgaaacaggtgtagaagttaaggacattgaattggtcatgtcacaagcaaatgtgtcgagagcaaaggcagtccgagccctgaagaacaacagtaatgatattgtaaatgcgattatggaattaacaatgtaaccatatggaagcaactttttttggtgtctcaaaggagtaactgcagcttggtttgaaatttgtactgtttctatcataaataaagttatggcttcttgttggaaaaaaaaaaaaaaaaaaaaaa

SEQ ID NO: 323 - protein, 215 aa, Homo sapiens
MPGEATETVPATEQELPQPQAETGSGTESDSDESVPELEEQDSTQATTQQAQLAAAAEIDEEPVSKAKQSRSEKKARKAMSKLGLRQVTGVTRVTIRKSKNILFVITKPDVYKSPASDTYIVFGEAKIEDLSQQAQLAAAEKFKVQGEAVSNIQENTQTPTVQEESEEEEVDETGVEVKDIELVMSQANVSRAKAVRALKNNSNDIVNAIMELTM

SEQ ID NO: 324 - DNA, 1058 bp, Homo sapiens
  CDS (520)..(873)
accgaacgcccccgggaacaccgggccccgagctcggtcccgcgcccgaggatcctccacggggctagatggctgcgtcgggggcgggagcggaggcaactccggccttccctgccctgacctggaacctctgggagggctgcagagtaagtgccgcctctgcgctccgacggaggcacgaggcctgtggagtaggtccctctgttccgacaggtgcgacacttggcgctccatgcttgcgggtgccgggaggcctggcctcccccagggccgccacctctgctggttgctctgtgctttcaccttaaagctctgccaagcagaggctcccgtgcaggaagagaagctgtcaggtgggtgattgtctgggaacccgacacgtcccgtcgtttgtttttggttttagtatcttccccatataccaagagcacaggtggaaaaggccggcaccacatggaatgagggcaagcgctgtgccgggaagttggatgggcagagcctgggagaaatgttttctgaatggcctggggctggcatttatctttcctttcagcaagcacctcaaatttgccatgctggctggtggaagagtttgtggtagcagaagagtgctctccatgctctaatttccgggctaaaactacccctgagtgtggtcccacaggatatgtagagaaaatcacatgcagctcatctaagagaaatgagttcaaaagctgccgctcagctttgatggaacaacgcttattttggaagttcgaaggggctgtcgtgtgtgtggccctgatcttcgcttgtcttgtcatcattcgtcagcgacaattggacagaaaggctctggaaaaggtccggaagcaaatcgagtccatatagctacattccacccttgtatcctgggtcttagagaccctatctcagacagtgaaagtgaaatggactgatttgcactcttggttctttggagccttgtggtggaatccccttttccccatcttcttctttcagatcattaatgagcagaataaaaagagtaaaatggtaaaaaaaaaaaaaaaaaa

SEQ ID NO: 325 - protein, 117 aa, Homo sapiens
MAWGWHLSFLSASTSNLPCWLVEEFVVAEECSPCSNFRAKTTPECGPTGYVEKITCSSSKRNEFKSCRSALMEQRLFWKFEGAVVCVALIFACLVIIRQRQLDRKALEKVRKQIESI

SEQ ID NO: 326 - DNA, 1245 bp, Homo sapiens
  CDS (31)..(774)
tcagggcctgtgttgccgcactctgctgctatgagcttcctcaaaagtttcccgccgcctgggccagcggaggggctcctgcggcagcagccagacactgaggctgtgctgaacgggaagggcctcggcactggtaccctttacatcgctgagagccgcctgtcttggttagatggctctggattaggattctcactggaataccccaccattagtttacatgcattatccagggaccgaagtgactgtctaggagagcatttgtatgttatggtgaatgccaaatttgaagaagaatcaaaagaacctgttgctgatgaagaagaggaagacagtgatgatgatgttgaacctattactgaatttagatttgtgcctagtgataaatcagcgttggaggcaatgttcactgcaatgtgcgaatgccaggccttgcatccagatcctgaggatgaggattcagatgactacgatggagaagaatatgatgtggaagcacatgaacaaggacagggggacatccctacattttacacctatgaagaaggattatcccatctaacagcagaaggccaagccacactggagagattagaaggaatgctttctcagtctgtgagcagccagtataatatggctggggtcaggacagaagattcaataagagattatgaagatgggatggaggtggataccacaccaacagttgctggacagtttgaggatgcagatgttgatcactgaaaatgatttatgcaagtttaagattctgctcctaagtgtaggagagaacttggtgcctcttccactctggagtgaagttaatgaaagtctttttccttttccaaaacccaacctgaaccagttctttcttgagacagactatactgagacaacaagttgtcaccagcagaagatagataatatgacctttattaacttgatgaattaacttaaccaagagggtatttgtagtttactatttaccctaaaactttctgtgtctgggtaccctctgagtaggcctataattcctaccttgactgtgtgcatcatttgtaagctagcagatctatgtggtgaaaatgcacaggagcttggtagactgcgggggaaagagagagctcctttcgccatgttttaccagtctgctgttataacctcttaggttgtatcctttaatttccagccttttaggttagtttctgtaacagaacaagtgagtctgggatgaagtcctcaaag

SEQ ID NO: 327 - protein, 237 aa, Homo sapiens
MSFLKSFPPPGPAEGLLRQQPDTEAVLNGKGLGTGTLYIAESRLSWLDGSGLGFSLEYPTISLHALSRDRSDCLGEHLYVMVNAKFEEESKEPVADEEEEDSDDDVEPITEFRFVPSDKSALEAMFTAMCECQALHPDPEDEDSDDYDGEEYDVEAHEQGQGDIPTFYTYEEGLSHLTAEGQATLERLEGMLSQSVSSQYNMAGVRTEDSIRDYEDGMEVDTTPTVAGQFEDADVDH

SEQ ID NO: 328 - protein, 4 aa, Homo sapiens
FMQV

SEQ ID NO: 329 - DNA, 647 bp, Homo sapiens
agaaactgatgtttattttccatcaaccatttttccatgctgcttaagagcctatgcaagaacagcttaagaccagtcagtggttgctcctacccattcagtggcctgagcagtgggagctgcagaccagtcttccgtggcaggctgagcgctccagtcttcagtagggaattgctgaataggcacagagggcacctgtacaccttcagaccagtctgcaacctcaggctgagtagcagtgaactcaggagcgggagcagtccattcaccctgaaattcctccttggtcactgccttctcagcagcagcctgctcttctttttcaatctcttcaggatctctgtagaagtacagatcaggcatgacctcccatgggtgttcacgggaaatggtgccacgcatgcgcagaacttcccgagccagcatccaccacattaaacccactgagtgagctcccttgttgttgcatgggatggcaatgtccacatagcgcagatgagattcttgtgtacacagcgcaatggtagggtaggtaacattagatgtctccgtgagaagcttgtgggcagacatggggttagtaaccctagaaagtcgtggctcccgaaagtttcctggattttgttagttgagggttcaggaatgaa

SEQ ID NO: 330 - DNA, 1086 bp, Homo sapiens
cgccgcctctcgctcgccgagctccagccgaaggagaaggggggtaagtaaggaggtctctgtaccatggctcgtacaaagcagactgcccgcaaatcgaccggtggtaaagcacccaggaagcaactggctacaaaagccgctcgcaagagtgcgccctctactggaggggtgaagaaacctcatcgttacaggcctggtactgtggcgctccgtgaaattagacgttatcagaagtccactgaacttctgattcgcaaacttcccttccagcgtctggtgcgagaaattgctcaggactttaaaacagatctgcgcttccagagcgcagctatcggtgctttgcaggaggcaagtgaggcctatctggttggcctttttgaagacaccaacccgtgtgctatccatgccaaacgtgtaacaattatgccaaaagacatccagctagcacgccgcatacgtggagaacgtgcttaagaatccactatgatgggaaacatttcattctcaaaaaaaaaaaaaaaaaaaaaaattcggggggataaatgagcgaggggcggacaaacacacgcggacccgcacacggggccatgggccaaaacgccggtcctggaacccaggtttcttggcccacaggcgcacacgcgccgggcaccccaaaggcagagccggataaatgcgaaaagcccaggtaactggtggacatacggaccgcagcacgagacacacgcgccgagtaacacgcgcccacaatagggcggggaatatttaggatcacgacgaacaaacacgtgcaggagcctacgcacaacaagcaggagacacggggtggttaggataagaacaaaaaagagaaaaacaaggcgaggaggccaacaagaaagaaacacacaaaaaagaaaaaaaagaagacaaagagaacgaacagacgagtgaagagaccgaagagagccaacacagacaaagagacagagcgacggcacgaaggcaggaccacacgacgcgaaccaacgacaaaccgacagcgagaccagagcaacacacatacacaaggcgagagagacaacggaagacgagctggaaaac

SEQ ID NO: 331 - DNA, 2505 bp, Homo sapiens
  CDS (146)..(1477)
tttgggttagggagagtgctttcgtttgttttaaatgggagaaactggagcatgttgccaaggcagagagccagcagagaggggtgaatggaagaaggagcgagaagggggttactgacgaagccttatcctggaggagagaaggatggactccagagcccagctttggggactggccttgaataaaaggagggccactctacctcatcctggagggagcacgaacctaaaggcagacccagaagagctttttacaaaactagagaaaattgggaagggctcctttggagaggtgttcaaaggcattgacaatcggactcagaaagtggttgccataaagatcattgatctggaagaagctgaagatgagatagaggacattcaacaagaaatcacagtgctgagtcagtgtgacagtccatatgtaaccaaatattatggatcctatctgaaggatacaaaattatggataataatggaatatcttggtggaggctccgcactagatctattagaacctggcccattagatgaaacccagatcgctactatattaagagaaatactgaaaggactcgattatctccattcggagaagaaaatccacagagacattaaagcggccaacgtcctgctgtctgagcatggcgaggtgaagctggcggactttggcgtggctggccagctgacagacacccagatcaaaaggaacaccttcgtgggcaccccattctggatggcacccgaggtcatcaaacagtcggcctatgactcgaaggcagacatctggtccctgggcataacagctattgaacttgcaagaggggaaccacctcattccgagctgcaccccatgaaagttttattcctcattccaaagaacaacccaccgacgttggaaggaaactacagtaaacccctcaaggagtttgtggaggcctgtttgaataaggagccgagctttagacccactgctaaggagttattgaagcacaagtttatactacgcaatgcaaagaaaacttcctacttgaccgagctcatcgacaggtacaagagatggaaggccgagcagagccatgacgactcgagctccgaggattccgacgcggaaacagatggccaagcctcggggggcagtgattctggggactggatcttcacaatccgagaaaaagatcccaagaatctcgagaatggagctcttcagccatcggacttggacagaaataagatgaaagacatcccaaagaggcctttctctcagtgtttatctacaattatttctcctctgtttgcagagttgaaggagaagagccaggcgtgcggagggaacttggggtccattgaagagctgcgaggggccatctacctagcggaggaggcgtgccctggcatctccgacaccatggtggcccagctcgtgcagcggctccagagatactctctaagtggtggaggaacttcatcccactgaaattcctttggcatttggggttttgtttttccttttttccttcttcatcctcctccttttttaaaagtcaacgagagccttcgctgactccaccgaagaggtgcgccactgggagccaccccagcgccaggcgcccgtccagggacacacacagtcttcactgtgctgcagccagatgaagtctctcagatgggtggggagggtcagctccttccagcgatcattttattttattttattacttttgtttttaattttaaccatagtgcacatattccaggaaagtgtctttaaaaacaaaaacaaaccctgaaatgtatatttgggattatgataaggcaactaaagacatgaaacctcaggtatcctgctttaagttgataactccctctggagcttggagaatcgctctggtggatgggtgtacagatttgtatataatgtcatttttacggaaaccctttcggcgtgcataaggaatcactgtgtacaaactggccaagtgcttctgtagataacgtcagtggagtaaatattcgacaggccataaacttgagtctattgccttgcctttattacatgtacattttgaattctgtgaccagtgatttgggttttattttgtatttgcagggtttgtcattaataattaatgcccctctcttacagaacactcctatttgtacctcaacaaatgcaaattttccccgtttgccctacgccccttttggtacacctagaggttgatttcctttttcatcgatggtactatttcttagtgttttaaattggaacatatcttgcctcatgaagctttaaattataattttcagtttctccccatgaagcgctctcgtctgacatttgtttggaatcgtgccactgctggtctgcgccagatgtaccgtcctttccaatacgattttctgttgcaccttgtagtggattctgcatatcatctttcccacctaaaaatgtctgaatgcttacacaaataaattttataacacgcttaaaaaaaaaaaaaa

SEQ ID NO: 332 - protein, 443 aa, Homo sapiens
MDSRAQLWGLALNKRRATLPHPGGSTNLKADPEELFTKLEKIGKGSFGEVFKGIDNRTQKVVAIKIIDLEEAEDEIEDIQQEITVLSQCDSPYVTKYYGSYLKDTKLWIIMEYLGGGSALDLLEPGPLDETQIATILREILKGLDYLHSEKKIHRDIKAANVLLSEHGEVKLADFGVAGQLTDTQIKRNTFVGTPFWMAPEVIKQSAYDSKADIWSLGITAIELARGEPPHSELHPMKVLFLIPKNNPPTLEGNYSKPLKEFVEACLNKEPSFRPTAKELLKHKFILRNAKKTSYLTELIDRYKRWKAEQSHDDSSSEDSDAETDGQASGGSDSGDWIFTIREKDPKNLENGALQPSDLDRNKMKDIPKRPFSQCLSTIISPLFAELKEKSQACGGNLGSIEELRGAIYLAEEACPGISDTMVAQLVQRLQRYSLSGGGTSSH
